(19) United States
(12) Patent Application Publication
(10) Pub. No.: US 2025/0129372 A1
(43) Pub. Date: Apr. 24, 2025

(54) Treatment Of Osteoarthritis With Procollagen Galactosyl Transferase 2 (COLGALT2) Inhibitors

(71) Applicant: Regeneron Pharmaceuticals, Inc., Tarrytown, NY (US)

(72) Inventors: Jonas Bovijn, Tarrytown, NY (US); Peter Dornbos, Tarrytown, NY (US); Luca Andrea Lotta, Tarrytown, NY (US); Jose Raya Garcia del Olmo, Tarrytown, NY (US); Benjamin Geraghty, Tarrytown, NY (US); Jonathan Marchini, Tarrytown, NY (US); Aris Baras, Tarrytown, NY (US); Mary Haas, Tarrytown, NY (US)

(21) Appl. No.: 18/925,530

(22) Filed: Oct. 24, 2024

Related U.S. Application Data
(60) Provisional application No. 63/545,458, filed on Oct. 24, 2023.

(51) Int. Cl. C12N 15/113; A61K 45/06; A61P 19/02; C12Q 1/6874; C12Q 1/6883

(52) U.S. Cl. CPC C12N 15/1137; A61K 45/06; A61P 19/02; C12Q 1/6874; C12Q 1/6883; C12N 2310/11; C12N 2310/14; C12N 2310/531; C12Q 2600/106; C12Q 2600/156

(57) ABSTRACT

The present disclosure generally relates to the treatment of subjects having osteoarthritis or at risk of developing osteoarthritis by administering a Procollagen Galactosyl Transferase 2 (COLGALT2) inhibitor to the subject.

### REFERENCE TO SEQUENCE LISTING

[0001] This application includes a Sequence Listing filed electronically as an XML file named 381204326SEQ, created on Oct. 24, 2024, with a size of 2,481,246 bytes. The Sequence Listing is incorporated herein by reference.

### FIELD

[0002] The present disclosure generally relates to the treatment of subjects having osteoarthritis or at risk of developing osteoarthritis, by administering a Procollagen Galactosyl Transferase 2 (COLGALT2) inhibitor to the subject, and to methods of identifying subjects having an increased risk of developing osteoarthritis.

### BACKGROUND

[0003] Osteoarthritis (OA) is the most common form of arthritis and affects millions worldwide. OA is a degenerative joint disease that affects all tissues in the joint. Damage to the articular cartilage, a soft tissue layer covering the bony ends, occurs early in the disease and is considered the onset of irreversible joint damage. Although OA can involve any joint, the most commonly affected joints are the knees, hip, hands, and spine. OA can be diagnosed by a physical examination and may include imaging tests (X-rays) to assess severity, and laboratory tests (such as, for example, blood or urine tests and joint fluid analysis). Symptoms of OA include: i) pain in joints, ii) joint stiffness upon awakening or after being inactive, iii) tenderness in joint when light pressure is applied to or near it, iv) loss of flexibility, v) grating sensation when using the joint (popping or crackling), vi) bone spurs can form around the affected joint, and vii) swelling (soft tissue inflammation around the joint). Risk factors for OA include: i) older age (e.g., risk of OA increases with age), ii) obesity (increased weight adds stress to weight-bearing joints and fat tissue produces proteins that can cause harmful inflammation in and around joints), iii) joint injuries, iv) sex (females are more likely to develop OA), v) repeated stress on the joint, vi) genetics, vii) bone deformities, and viii) some metabolic diseases (such as diabetes and hemochromatosis).

[0004] COLGALT2 is encoded by a 108 kb gene located at 1q25.3. COLGALT2 protein is 626 amino acids long and is a 73 kDa beta-galactosyltransferase that transfers beta-galactose to hydroxylysine residues of collagen. COLGALT2 is thought to enable procollagen galactosyltransferase activity involved in collagen fibril organization. In addition, COLGALT2 is predicted to be involved in collagen chain trimerization and extracellular matrix organization pathways.

### SUMMARY

[0005] The present disclosure provides methods of treating a subject having OA, or at risk of developing OA, the methods comprising administering a COLGALT2 inhibitor to the subject.

[0006] The present disclosure also provides methods of treating a subject having OA or at risk of developing OA by administering an OA therapeutic agent or OA therapy, the methods comprising: determining or having determined whether the subject has a COLGALT2 variant nucleic acid molecule, by: obtaining or having obtained a biological sample from the subject; and performing or having performed a sequence analysis on the biological sample to determine if the subject has a genotype comprising a COLGALT2 variant nucleic acid molecule; and administering or continuing to administer the OA therapeutic agent in an amount that is the same as or less than a standard dosage amount or OA therapy, and/or administering a COLGALT2 inhibitor to a subject that is COLGALT2 reference; administering or continuing to administer the OA therapeutic agent in an amount that is the same as or less than a standard dosage amount or OA therapy, and/or administering a COLGALT2 inhibitor to a subject that is heterozygous for the COLGALT2 variant nucleic acid molecule; or administering or continuing to administer the OA therapeutic agent or OA therapy in a standard dosage amount to a subject that is homozygous for the COLGALT2 variant nucleic acid molecule; wherein the presence the COLGALT2 variant nucleic acid molecule indicates the subject has a decreased risk of developing OA.

[0007] The present disclosure also provides methods of identifying a subject having an increased risk of developing OA, the methods comprising: determining or having determined the presence or absence of a COLGALT2 variant nucleic acid molecule in a biological sample obtained from the subject; wherein: when the subject is COLGALT2 reference, then the subject has an increased risk of developing OA; and when the subject is heterozygous or homozygous for the COLGALT2 variant nucleic acid molecule, then the subject has a decreased risk of developing OA.

[0008] The present disclosure also provides OA therapeutic agents for use in the treatment or prevention of OA in a subject having a COLGALT2 variant nucleic acid molecule.

[0009] The present disclosure also provides COLGALT2 inhibitors for use in the treatment or prevention of OA in a subject that is COLGALT2 reference or is heterozygous for a COLGALT2 variant nucleic acid molecule.

### BRIEF DESCRIPTION OF THE DRAWINGS

[0010] FIG. 1 shows rare coding variants in COLGALT2 were observed to be associated with lower risk of clinically-defined knee and hip OA.

[0011] FIG. 2 shows association between COLGALT2 rare variants and greater Dual-Energy X-Ray Absorptiometry (DXA)-derived mJSW, validating protective association with OA.

[0012] FIG. 3 shows rare pLOF and missense variants in COLGALT2 are associated with lower risk of knee or hip replacement, with stronger effect size observed for pLOF mutations only.

### DESCRIPTION

[0013] Various terms relating to aspects of the present disclosure are used throughout the specification and claims. Such terms are to be given their ordinary meaning in the art, unless otherwise indicated. Other specifically defined terms are to be construed in a manner consistent with the definitions provided herein.

[0014] Unless otherwise expressly stated, it is in no way intended that any method or aspect set forth herein be construed as requiring that its steps be performed in a specific order. Accordingly, where a method claim does not specifically state in the claims or descriptions that the steps are to be limited to a specific order, it is in no way intended that an order be inferred, in any respect. This holds for any possible non-expressed basis for interpretation, including matters of logic with respect to arrangement of steps or operational flow, plain meaning derived from grammatical organization or punctuation, or the number or type of aspects described in the specification.

[0015] As used herein, the singular forms “a,” “an” and “the” include plural referents unless the context clearly dictates otherwise.

[0016] As used herein, the term “about” means that the recited numerical value is approximate and small variations would not significantly affect the practice of the disclosed embodiments. Where a numerical value is used, unless indicated otherwise by the context, the term “about” means the numerical value can vary by +10% and remain within the scope of the disclosed embodiments.

[0017] As used herein, the term “comprising” may be replaced with “consisting” or “consisting essentially of” in particular embodiments as desired.

[0018] As used herein, the terms “nucleic acid”, “nucleic acid molecule”, “nucleic acid sequence”, “polynucleotide”, or “oligonucleotide” can comprise a polymeric form of nucleotides of any length, can comprise DNA and/or RNA, and can be single-stranded, double-stranded, or multiple stranded. One strand of a nucleic acid also refers to its complement.

[0019] As used herein, the term “subject” includes any animal, including mammals. Mammals include, but are not limited to, farm animals (such as, for example, horses, cows, and pigs), companion animals (such as, for example, dogs and cats), laboratory animals (such as, for example, mice, rats, and rabbits), and non-human primates. In some embodiments, the subject is a human. In some embodiments, the human is a patient under the care of a physician.

[0020] It has been observed in accordance with the present disclosure that rare COLGALT2 variant nucleic acid molecules (whether these variants are homozygous or heterozygous in a particular subject) associated with a decreased risk of developing OA. In particular, rare pLOF and missense variants in COLGALT2 associated with lower risk of OA, particularly hip and knee (OR, 0.89; p=2.3e-8). In addition, rare pLOF variants only in COLGALT2 are associated with large effect protection from OA of knee and hip (40% lower odds in heterozygous carriers: OR, 0.58; p=0.013). Further, analysis of DXA imaging-derived knee minimum joint space width (mJSW) validates COLGALT2 protective association. It is believed that rare variants predicted to induce loss-of function in COLGALT2 have not been associated with protection from OA in humans. Therefore, subjects that are COLGALT2 reference or heterozygous for a COLGALT2 variant nucleic acid molecule may be treated with a COLGALT2 inhibitor such that OA is inhibited or prevented, the symptoms thereof are reduced or prevented, and/or development of symptoms is repressed or prevented. It is also believed that such subjects having OA may further be treated with one or more OA therapeutic agents or OA therapy that treats or inhibits OA. In addition, the present disclosure provides methods of leveraging the presence or absence of COLGALT2 variant nucleic acid molecules in subjects to identify or stratify risk is such subjects of developing OA, or to diagnose subjects as having an increased risk of developing OA.

[0021] For purposes of the present disclosure, any particular subject, such as a human, can be categorized as having one of three COLGALT2 genotypes: i) COLGALT2 reference; ii) heterozygous for a COLGALT2 variant nucleic acid molecule; or iii) homozygous for a COLGALT2 variant nucleic acid molecule. A subject is COLGALT2 reference when the subject does not have a copy of a COLGALT2 variant nucleic acid molecule. A subject is heterozygous for a COLGALT2 variant nucleic acid molecule when the subject has a single copy of a COLGALT2 variant nucleic acid molecule. A subject is homozygous for a COLGALT2 variant nucleic acid molecule when the subject has two copies of a COLGALT2 variant nucleic acid molecule.

[0022] In any of the embodiments described herein, the COLGALT2 variant nucleic acid molecule can be any nucleic acid molecule (such as, a genomic nucleic acid molecule, an mRNA molecule, or a cDNA molecule produced from an mRNA molecule) encoding a COLGALT2 variant polypeptide having a partial loss-of-function, a complete loss-of-function, a predicted partial loss-of-function, or a predicted complete loss-of-function. A subject who has a COLGALT2 polypeptide having a partial loss-of-function (or predicted partial loss-of-function) is hypomorphic for COLGALT2. In some embodiments, the COLGALT2 variant nucleic acid molecule results in decreased or aberrant expression or activity of COLGALT2 mRNA or polypeptide. In some embodiments, the COLGALT2 variant nucleic acid molecule is associated with a reduced in vitro response to COLGALT2 ligands compared with reference COLGALT2. In some embodiments, the COLGALT2 variant nucleic acid molecule is a splice-site variant, a stop-gain variant, a start-loss variant, a stop-loss variant, a frameshift variant, an in-frame indel variant, or a variant that encodes a truncated COLGALT2 variant polypeptide. In some embodiments, the COLGALT2 variant nucleic acid molecule is a missense variant nucleic acid molecule. In some embodiments, the COLGALT2 variant nucleic acid molecule comprises a single nucleotide polymorphism (SNP). In some embodiments, the COLGALT2 variant nucleic acid molecule comprises a variation in a coding region. In some embodiments, the COLGALT2 variant nucleic acid molecule does not comprise a variation in a non-coding region, except for a splice acceptor region (two bases before the start of any exon except the first). In some embodiments, the COLGALT2 variant nucleic acid molecule results or is predicted to result in a premature truncation of a COLGALT2 polypeptide compared to the reference COLGALT2. In some embodiments, the COLGALT2 variant nucleic acid molecule is a variant that is predicted to be damaging to the protein function (and hence, in this case, protective to the human) by in vitro prediction algorithms such as Polyphen, SIFT, or similar algorithms. In some embodiments, the COLGALT2 variant nucleic acid molecule is a variant that causes or is predicted to cause a nonsynonymous amino acid substitution in a COLGALT2 nucleic acid molecule and whose allele frequency is less than 1/100 alleles in the population from which the subject is selected. In some embodiments, the COLGALT2 variant nucleic acid molecule is any rare missense variant (allele frequency <0.1%; or 1 in 1,000 alleles), or any splice-site, stop-gain, start-loss, stop-loss, frameshift, or in-frame indel, or other frameshift COLGALT2 variant.

[0023] In any of the embodiments described herein, the COLGALT2 variant genomic nucleic acid molecule may include one or more variations at any of the positions of chromosome 1 (i.e., positions 183,929,854-184,037,729) using the nucleotide sequence of the COLGALT2 reference genomic nucleic acid molecule in the GRCh38/hg38 human genome assembly (see, ENSG00000198756.12, ENST00000361927.9 annotated in the in the Ensembl database (URL: world wide web at “https://useast.ensembl.org/Homo_sapiens/Gene/Summary?g=ENSG00000198756;r=1:183929854-184037729;transcript=ENST00000361927.9”)) as a reference sequence. The sequences provided in these transcripts for the COLGALT2 genomic nucleic acid molecule are only exemplary sequences. Other sequences for the COLGALT2 genomic nucleic acid molecule are also possible.

[0024] In any of the embodiments described herein, the COLGALT2 variant nucleic acid molecule may comprise any one or more of the genetic variations in the genomic nucleic acid molecule (referring to the chromosome: positions set forth in the GRCh38/hg38 human genome assembly) set forth in Table 4, or an mRNA molecule produced therefrom, or a cDNA molecule produced from the mRNA molecule. In some instances, in any of the embodiments described in the present disclosure, the COLGALT2 variant is not Tyr212Cys or Tyr212Phe.

[0025] For subjects that are genotyped or determined to be COLGALT2 reference, such subjects have an increased risk of developing OA. For subjects that are genotyped or determined to be either COLGALT2 reference or heterozygous for a COLGALT2 variant nucleic acid molecule, such subjects can be treated with a COLGALT2 inhibitor.

[0026] In any of the embodiments described herein, the subject in whom OA is prevented by administering a COLGALT2 inhibitor may be anyone at risk for developing OA including, but not limited to, subjects with a genetic predisposition for developing OA. In some embodiments, administering a COLGALT2 inhibitor to a subject having OA may be carried out to prevent development of another occurrence of OA in a subject who has already had OA. In any of the embodiments described herein, the methods can be used to improve OA.

[0027] In any of the embodiments described herein, the COLGALT2 predicted loss-of-function polypeptide can be any COLGALT2 polypeptide having a partial loss-of-function, a complete loss-of-function, a predicted partial loss-of-function, or a predicted complete loss-of-function.

[0028] Any one or more (i.e., any combination) of the COLGALT2 variant nucleic acid molecules described herein can be used within any of the methods described herein to determine whether a subject has an increased or decreased risk of developing OA. The combinations of particular variants can form a mask used for statistical analysis of the particular correlation of COLGALT2 and an increased or decreased risk of developing OA. In some embodiments, the mask used for statistical analysis of the particular correlation of COLGALT2 and an increased or decreased risk of developing OA can exclude any one or more of these COLGALT2 variant nucleic acid molecules described herein.

[0029] In any of the embodiments described herein, the subject can have OA. In any of the embodiments described herein, the subject can be at risk of developing OA.

[0030] The present disclosure provides methods of treating a subject having OA or at risk of developing OA, the methods comprising administering a COLGALT2 inhibitor to the subject.

[0031] The present disclosure also provides methods of preventing the need or prolonging the need for a joint replacement, such as a knee replacement and/or hip replacement, in a subject, the methods comprising administering a COLGALT2 inhibitor to the subject. Such prolonging can be, for example, months to years. For example, a subject that has an increased risk of requiring a joint replacement (e.g., knee and/or hip) can be administered a COLGALT2 inhibitor in order to prolong the time period before an actual joint replacement surgery, or prevent the actual joint replacement altogether. In some embodiments, the need for a joint replacement surgery is an outcome of osteoarthritis.

[0032] In some embodiments, the COLGALT2 inhibitor comprises an inhibitory nucleic acid molecule. Examples of inhibitory nucleic acid molecules include, but are not limited to, antisense nucleic acid molecules, small interfering RNAs (siRNAs), and short hairpin RNAs (shRNAs). Such inhibitory nucleic acid molecules can be designed to target any region of a COLGALT2 nucleic acid molecule. In some embodiments, the antisense RNA, siRNA, or shRNA hybridizes to a sequence within a COLGALT2 genomic nucleic acid molecule or mRNA molecule and decreases expression of the COLGALT2 polypeptide in a cell in the subject. In some embodiments, the COLGALT2 inhibitor comprises an antisense molecule that hybridizes to a COLGALT2 genomic nucleic acid molecule or mRNA molecule and decreases expression of the COLGALT2 polypeptide in a cell in the subject. In some embodiments, the COLGALT2 inhibitor comprises an siRNA that hybridizes to a COLGALT2 genomic nucleic acid molecule or mRNA molecule and decreases expression of the COLGALT2 polypeptide in a cell in the subject. In some embodiments, the COLGALT2 inhibitor comprises an shRNA that hybridizes to a COLGALT2 genomic nucleic acid molecule or mRNA molecule and decreases expression of the COLGALT2 polypeptide in a cell in the subject. Exemplary antisense sequences are listed in Table 1, and exemplary siRNA molecules are listed in Table 2.

TABLE 1
Antisense molecules

| | SEQ ID |
|---|---|
| Antisense Sequence | NO: |
| UCCCUAGAGCCGCGAGUUGU | 1 |
| UUCCCUAGAGCCGCGAGUUG | 2 |
| CUUCCCUAGAGCCGCGAGUU | 3 |
| GGUCUGUGGCCUUCCCUAGA | 4 |
| AGGUCUGUGGCCUUCCCUAG | 5 |
| GAGGUCUGUGGCCUUCCCUA | 6 |
| UGAGGUCUGUGGCCUUCCCU | 7 |
| AGCUGAGGUCUGUGGCCUUC | 8 |
| CAGGUUCCGCUCGUACAGCU | 9 |
| UCCAGGUUCCGCUCGUACAG | 10 |
| GUCCAGGUUCCGCUCGUACA | 11 |
| AGUCCAGGUUCCGCUCGUAC | 12 |
| UAGUCCAGGUUCCGCUCGUA | 13 |
| CUAGUCCAGGUUCCGCUCGU | 14 |
| UCUAGUCCAGGUUCCGCUCG | 15 |
| CUCUAGUCCAGGUUCCGCUC | 16 |
| CCUCUAGUCCAGGUUCCGCU | 17 |
| UCCUCUAGUCCAGGUUCCGC | 18 |
| UUCCUCUAGUCCAGGUUCCG | 19 |
| AGUUCCUCUAGUCCAGGUUC | 20 |
| AAGUUCCUCUAGUCCAGGUU | 21 |
| AAAGUUCCUCUAGUCCAGGU | 22 |
| GAAAGUUCCUCUAGUCCAGG | 23 |
| GGAAAGUUCCUCUAGUCCAG | 24 |
| CUGUGUGCCCUGAGUCCUGA | 25 |
| UCGCAGACAGUAGUGGCCGA | 26 |
| UCGGGCUCGCAGACAGUAGU | 27 |
| AGAGGAGCAGUAGCGACCAG | 28 |
| GAGAGGAGCAGUAGCGACCA | 29 |
| AGGAGAGGAGCAGUAGCGAC | 30 |
| GAGGAGAGGAGCAGUAGCGA | 31 |
| GAUCAGUGGCUGCCCAGAUG | 32 |
| UAGUGAUAGAGUCUCUGUAC | 33 |
| CAUAGUGAUAGAGUCUCUGU | 34 |
| CACAUAGUGAUAGAGUCUCU | 35 |
| CCACAUAGUGAUAGAGUCUC | 36 |
| CUCUGGUUCAUCCAUAGGCC | 37 |
| ACUCUGGUUCAUCCAUAGGC | 38 |
| GACUCUGGUUCAUCCAUAGG | 39 |
| AGACUCUGGUUCAUCCAUAG | 40 |
| AAGACUCUGGUUCAUCCAUA | 41 |
| UAAGACUCUGGUUCAUCCAU | 42 |
| GUAAGACUCUGGUUCAUCCA | 43 |
| GGUAAGACUCUGGUUCAUCC | 44 |
| GGGUAAGACUCUGGUUCAUC | 45 |
| UCAGGGUAAGACUCUGGUUC | 47 |
| AUCAGGGUAAGACUCUGGUU | 48 |
| CAUCAGGGUAAGACUCUGGU | 49 |
| UCAUCAGGGUAAGACUCUGG | 50 |
| UUCAUCAGGGUAAGACUCUG | 51 |
| UUUCAUCAGGGUAAGACUCU | 52 |
| AUUUCAUCAGGGUAAGACUC | 53 |
| CAAUUUCAUCAGGGUAAGAC | 54 |
| CCAAUUUCAUCAGGGUAAGA | 55 |
| UCCAAUUUCAUCAGGGUAAG | 56 |
| GGUCCAAUUUCAUCAGGGUA | 57 |
| UGGUCCAAUUUCAUCAGGGU | 58 |
| UUGGUCCAAUUUCAUCAGGG | 59 |
| UGCUUUGGUCCAAUUUCAUC | 60 |
| GUGCUUUGGUCCAAUUUCAU | 61 |
| CAGUGCUUUGGUCCAAUUUC | 62 |
| CCAGUGCUUUGGUCCAAUUU | 63 |
| GCCAGUGCUUUGGUCCAAUU | 64 |
| GGCCAGUGCUUUGGUCCAAU | 65 |
| ACAUGGGCAAACCGGGAGGU | 66 |
| UCACAUGGGCAAACCGGGAG | 67 |
| AUCACAUGGGCAAACCGGGA | 68 |
| CAUCACAUGGGCAAACCGGG | 69 |
| UCAUCACAUGGGCAAACCGG | 70 |
| UUCAUCACAUGGGCAAACCG | 71 |
| AGUUUCAUCACAUGGGCAAA | 72 |
| UCGUAGUUUCAUCACAUGGG | 73 |
| GUCGUAGUUUCAUCACAUGG | 74 |
| UGUCGUAGUUUCAUCACAUG | 75 |
| CUGUCGUAGUUUCAUCACAU | 76 |
| CCUGUCGUAGUUUCAUCACA | 77 |
| GCCUGUCGUAGUUUCAUCAC | 78 |
| UGCCUGUCGUAGUUUCAUCA | 79 |
| CUGCCUGUCGUAGUUUCAUC | 80 |
| GCUGCCUGUCGUAGUUUCAU | 81 |
| GGCUGCCUGUCGUAGUUUCA | 82 |
| AGGGCUGCCUGUCGUAGUUU | 83 |
| AAGGGCUGCCUGUCGUAGUU | 84 |
| GAAGGGCUGCCUGUCGUAGU | 85 |
| UCGAAGGGCUGCCUGUCGUA | 86 |
| GGAUUAGUCAGGAAAUUGUC | 87 |
| GUGGAUUAGUCAGGAAAUUG | 88 |
| GAGGGUCUGUGGAUUAGUCA | 89 |
| UGAGGGUCUGUGGAUUAGUC | 90 |
| UUGAGGGUCUGUGGAUUAGU | 91 |
| AUUGAGGGUCUGUGGAUUAG | 92 |
| GAUUGAGGGUCUGUGGAUUA | 93 |
| AGAUUGAGGGUCUGUGGAUU | 94 |
| UAGAUUGAGGGUCUGUGGAU | 95 |
| AGUAGAUUGAGGGUCUGUGG | 96 |
| CAGUAGAUUGAGGGUCUGUG | 97 |
| UCAGUAGAUUGAGGGUCUGU | 98 |
| AUCAGUAGAUUGAGGGUCUG | 99 |
| AGAAAUUAGAAUACAGGCCC | 100 |
| CAGAAAUUAGAAUACAGGCC | 101 |
| CCAGAAAUUAGAAUACAGGC | 102 |
| CGCACCAGAAAUUAGAAUAC | 103 |
| UCCGCACCAGAAAUUAGAAU | 104 |
| UUCCGCACCAGAAAUUAGAA | 105 |
| AUUCCGCACCAGAAAUUAGA | 106 |
| GAUUCCGCACCAGAAAUUAG | 107 |
| UGAUUCCGCACCAGAAAUUA | 108 |
| GUGAUUCCGCACCAGAAAUU | 109 |
| GAAUCUGAACGUAGUCUGGG | 110 |
| CGAAUCUGAACGUAGUCUGG | 111 |
| UCGAAUCUGAACGUAGUCUG | 112 |
| CUCGAAUCUGAACGUAGUCU | 113 |
| UUCUCGAAUCUGAACGUAGU | 114 |
| AUUCUCGAAUCUGAACGUAG | 115 |
| CAUUCUCGAAUCUGAACGUA | 116 |
| CCAUUCUCGAAUCUGAACGU | 117 |
| UCCAUUCUCGAAUCUGAACG | 118 |
| UUCCAUUCUCGAAUCUGAAC | 119 |
| CUUCCAUUCUCGAAUCUGAA | 120 |
| UCUUCCAUUCUCGAAUCUGA | 121 |
| CUCUUCCAUUCUCGAAUCUG | 122 |
| CCUCUUCCAUUCUCGAAUCU | 123 |
| UCCUCUUCCAUUCUCGAAUC | 124 |
| AGCAGCCUGUCCUCUUCCAU | 125 |
| CAAUUAGGAAGGUGGAGUGG | 126 |
| UCAAUUAGGAAGGUGGAGUG | 127 |
| GGUCAAUUAGGAAGGUGGAG | 128 |
| AGGUCAAUUAGGAAGGUGGA | 129 |
| GAGGUCAAUUAGGAAGGUGG | 130 |
| UGAGGUCAAUUAGGAAGGUG | 131 |
| CUCCUUCCUGAGGUCAAUUA | 132 |
| AAGUCAGCUUGUCCGAGGCC | 133 |
| UAGAAAGUCAGCUUGUCCGA | 134 |
| GUAGAAAGUCAGCUUGUCCG | 135 |
| CAUCAAAGGUCCAGGUGUAG | 136 |
| UCAUCAAAGGUCCAGGUGUA | 137 |
| GUCAUCAAAGGUCCAGGUGU | 138 |
| UGUCAUCAAAGGUCCAGGUG | 139 |
| AUGUCAUCAAAGGUCCAGGU | 140 |
| GAUGUCAUCAAAGGUCCAGG | 141 |
| GAAGGCAAAGACAAUGAUGU | 142 |
| UCUGGAUGCCUGCUUGCCUG | 143 |
| AUCUGGAUGCCUGCUUGCCU | 144 |
| UACAUCUGGAUGCCUGCUUG | 145 |
| GUACAUCUGGAUGCCUGCUU | 146 |
| GGUACAUCUGGAUGCCUGCU | 147 |
| AGGUACAUCUGGAUGCCUGC | 148 |
| GAGGUACAUCUGGAUGCCUG | 149 |
| AGAGGUACAUCUGGAUGCCU | 150 |
| CAUAGUGCUCUCUGUUGCAG | 151 |
| CCAUAGUGCUCUCUGUUGCA | 152 |
| GCCAUAGUGCUCUCUGUUGC | 153 |
| AGCCAUAGUGCUCUCUGUUG | 154 |
| UAGCCAUAGUGCUCUCUGUU | 155 |
| GUAGCCAUAGUGCUCUCUGU | 156 |
| GGUAGCCAUAGUGCUCUCUG | 157 |
| AGGUAGCCAUAGUGCUCUCU | 158 |
| CAGGUAGCCAUAGUGCUCUC | 159 |
| GCAGGUAGCCAUAGUGCUCU | 160 |
| GGCAGGUAGCCAUAGUGCUC | 161 |
| GGGCAGGUAGCCAUAGUGCU | 162 |
| UGGGCAGGUAGCCAUAGUGC | 163 |
| GUUCUCGAUGUCUUCCUGCA | 164 |
| GAGGUUCUCGAUGUCUUCCU | 165 |
| UGAGGUUCUCGAUGUCUUCC | 166 |
| AUGAGGUUCUCGAUGUCUUC | 167 |
| GAUGAGGUUCUCGAUGUCUU | 168 |
| GGAUGAGGUUCUCGAUGUCU | 169 |
| UGGAUGAGGUUCUCGAUGUC | 170 |
| AUGGAUGAGGUUCUCGAUGU | 171 |
| CAUGGAUGAGGUUCUCGAUG | 172 |
| ACAUGGAUGAGGUUCUCGAU | 173 |
| CACAUGGAUGAGGUUCUCGA | 174 |
| GCACAUGGAUGAGGUUCUCG | 175 |
| UGCACAUGGAUGAGGUUCUC | 176 |
| CUGCACAUGGAUGAGGUUCU | 177 |
| UCUGCACAUGGAUGAGGUUC | 178 |
| AUCUGCACAUGGAUGAGGUU | 179 |
| ACGGUCAAUCAUUGCUUCAA | 180 |
| GACGGUCAAUCAUUGCUUCA | 181 |
| GGACGGUCAAUCAUUGCUUC | 182 |
| AGGACGGUCAAUCAUUGCUU | 183 |
| GAGGACGGUCAAUCAUUGCU | 184 |
| GGAGGACGGUCAAUCAUUGC | 185 |
| UGGAGGACGGUCAAUCAUUG | 186 |
| UUGGAGGACGGUCAAUCAUU | 187 |
| UUCCAUUGGAGGACGGUCAA | 188 |
| GUUCCAUUGGAGGACGGUCA | 189 |
| GGUUCCAUUGGAGGACGGUC | 190 |
| GGGUUCCAUUGGAGGACGGU | 191 |
| AGGGUUCCAUUGGAGGACGG | 192 |
| GAGGGUUCCAUUGGAGGACG | 193 |
| GGAGGGUUCCAUUGGAGGAC | 194 |
| CUGGGAGGGUUCCAUUGGAG | 195 |
| ACUGGGAGGGUUCCAUUGGA | 196 |
| ACAUACUGGGAGGGUUCCAU | 197 |
| GACAUACUGGGAGGGUUCCA | 198 |
| CUGAGACAUACUGGGAGGGU | 199 |
| CAACUGAGACAUACUGGGAG | 200 |
| GGGACAACUGAGACAUACUG | 201 |
| AGGGACAACUGAGACAUACU | 202 |
| UAGGGACAACUGAGACAUAC | 203 |
| UUAGGGACAACUGAGACAUA | 204 |
| UUUAGGGACAACUGAGACAU | 205 |
| AUUUAGGGACAACUGAGACA | 206 |
| UAUUUAGGGACAACUGAGAC | 207 |
| GGAUAUUUAGGGACAACUGA | 208 |
| UGGAUAUUUAGGGACAACUG | 209 |
| UCUGGAUAUUUAGGGACAAC | 210 |
| CCCAUCUUGUCUGGAUAUUU | 211 |
| UCCCAUCUUGUCUGGAUAUU | 212 |
| CAAAUCCCAUCUUGUCUGGA | 213 |
| UCAAAUCCCAUCUUGUCUGG | 214 |
| AUCAAAUCCCAUCUUGUCUG | 215 |
| UCAUCAAAUCCCAUCUUGUC | 216 |
| CUCAUCAAAUCCCAUCUUGU | 217 |
| UCUCAUCAAAUCCCAUCUUG | 218 |
| UGCGUUUGAGGUUUAUCAUG | 219 |
| CUGCGUUUGAGGUUUAUCAU | 220 |
| UCUGCGUUUGAGGUUUAUCA | 221 |
| UUCUGCGUUUGAGGUUUAUC | 222 |
| CUUUCUGCGUUUGAGGUUUA | 223 |
| CCUUUCUGCGUUUGAGGUUU | 224 |
| UCCUUUCUGCGUUUGAGGUU | 225 |
| GUCCUUUCUGCGUUUGAGGU | 226 |
| UGUCCUUUCUGCGUUUGAGG | 227 |
| CUGUCCUUUCUGCGUUUGAG | 228 |
| CCUGUCCUUUCUGCGUUUGA | 229 |
| GCCUGUCCUUUCUGCGUUUG | 230 |
| CGCCUGUCCUUUCUGCGUUU | 231 |
| CCGCCUGUCCUUUCUGCGUU | 232 |
| CUCAAUCUCCUGUUCAUACA | 233 |
| CCUCAAUCUCCUGUUCAUAC | 234 |
| ACCUCAAUCUCCUGUUCAUA | 235 |
| GACCUCAAUCUCCUGUUCAU | 236 |
| UGACCUCAAUCUCCUGUUCA | 237 |
| UUGACCUCAAUCUCCUGUUC | 238 |
| CUUGACCUCAAUCUCCUGUU | 239 |
| UCUUGACCUCAAUCUCCUGU | 240 |
| AUCUUGACCUCAAUCUCCUG | 241 |
| AAUCUUGACCUCAAUCUCCU | 242 |
| ACAAUCUUGACCUCAAUCUC | 243 |
| GACAAUCUUGACCUCAAUCU | 244 |
| CGACAAUCUUGACCUCAAUC | 245 |
| UCGACAAUCUUGACCUCAAU | 246 |
| CUCGACAAUCUUGACCUCAA | 247 |
| CCUCGACAAUCUUGACCUCA | 248 |
| GCCUCGACAAUCUUGACCUC | 249 |
| AGCCUCGACAAUCUUGACCU | 250 |
| CAGCCUCGACAAUCUUGACC | 251 |
| ACAGCCUCGACAAUCUUGAC | 252 |
| CACAGCCUCGACAAUCUUGA | 253 |
| CCACAGCCUCGACAAUCUUG | 254 |
| UCCACAGCCUCGACAAUCUU | 255 |
| AUCCACAGCCUCGACAAUCU | 256 |
| CAUCCACAGCCUCGACAAUC | 257 |
| CCAUCCACAGCCUCGACAAU | 258 |
| CCUUUCCAUCCACAGCCUCG | 259 |
| GCCUUUCCAUCCACAGCCUC | 260 |
| UGCCUUUCCAUCCACAGCCU | 261 |
| GUGCCUUUCCAUCCACAGCC | 262 |
| AGUGCCUUUCCAUCCACAGC | 263 |
| GAGUGCCUUUCCAUCCACAG | 264 |
| UGAGUGCCUUUCCAUCCACA | 265 |
| UUGAGUGCCUUUCCAUCCAC | 266 |
| GUUGAGUGCCUUUCCAUCCA | 267 |
| UGUUGAGUGCCUUUCCAUCC | 268 |
| GUGUUGAGUGCCUUUCCAUC | 269 |
| UGUGUUGAGUGCCUUUCCAU | 270 |
| CUUGUGUUGAGUGCCUUUCC | 271 |
| UAGCCAGGCAGCAUUUCAAU | 272 |
| GAUAGCCAGGCAGCAUUUCA | 273 |
| CGAUAGCCAGGCAGCAUUUC | 274 |
| UCGAUAGCCAGGCAGCAUUU | 275 |
| UCUCGAUAGCCAGGCAGCAU | 276 |
| AUCUCGAUAGCCAGGCAGCA | 277 |
| GAUCUCGAUAGCCAGGCAGC | 278 |
| GGAUCUCGAUAGCCAGGCAG | 279 |
| GGGAUCUCGAUAGCCAGGCA | 280 |
| AGGGAUCUCGAUAGCCAGGC | 281 |
| UAGGGAUCUCGAUAGCCAGG | 282 |
| AUAGGGAUCUCGAUAGCCAG | 283 |
| AAUAGGGAUCUCGAUAGCCA | 284 |
| GAAUAGGGAUCUCGAUAGCC | 285 |
| GGAAUAGGGAUCUCGAUAGC | 286 |
| AGGAAUAGGGAUCUCGAUAG | 287 |
| GAGGAAUAGGGAUCUCGAUA | 288 |
| GGAGGAAUAGGGAUCUCGAU | 289 |
| UGGAGGAAUAGGGAUCUCGA | 290 |
| CUGGAGGAAUAGGGAUCUCG | 291 |
| GCCUGGAGGAAUAGGGAUCU | 292 |
| GGCCUGGAGGAAUAGGGAUC | 293 |
| CGAUCAAUUACCUCUUUCCA | 294 |
| UCGAUCAAUUACCUCUUUCC | 295 |
| CUCGAUCAAUUACCUCUUUC | 296 |
| CUCUCGAUCAAUUACCUCUU | 297 |
| GCUCUCGAUCAAUUACCUCU | 298 |
| AGCUCUCGAUCAAUUACCUC | 299 |
| UAGCUCUCGAUCAAUUACCU | 300 |
| CUAGCUCUCGAUCAAUUACC | 301 |
| UCUAGCUCUCGAUCAAUUAC | 302 |
| CUCUAGCUCUCGAUCAAUUA | 303 |
| UCUCUAGCUCUCGAUCAAUU | 304 |
| UUCUCUAGCUCUCGAUCAAU | 305 |
| CUUCUCUAGCUCUCGAUCAA | 306 |
| UCUUCUCUAGCUCUCGAUCA | 307 |
| GAGUCUUCUCUAGCUCUCGA | 308 |
| GCACAUCGUCUUCAAUUACA | 309 |
| CGCACAUCGUCUUCAAUUAC | 310 |
| ACGCACAUCGUCUUCAAUUA | 311 |
| AACGCACAUCGUCUUCAAUU | 312 |
| AAACGCACAUCGUCUUCAAU | 313 |
| AAAACGCACAUCGUCUUCAA | 314 |
| CAAAACGCACAUCGUCUUCA | 315 |
| UCAAAACGCACAUCGUCUUC | 316 |
| CUCAAAACGCACAUCGUCUU | 317 |
| GCUCAAAACGCACAUCGUCU | 318 |
| AUGCUCAAAACGCACAUCGU | 319 |
| CUGAUGCUCAAAACGCACAU | 320 |
| ACUGAUGCUCAAAACGCACA | 321 |
| AACUGAUGCUCAAAACGCAC | 322 |
| AAACUGAUGCUCAAAACGCA | 323 |
| UAUCCAUCAGCUUCAUCAGC | 324 |
| UUAUCCAUCAGCUUCAUCAG | 325 |
| GUUAUCCAUCAGCUUCAUCA | 326 |
| CAAUGUUAUCCAUCAGCUUC | 327 |
| GUCAAUGUUAUCCAUCAGCU | 328 |
| UGGUCAAUGUUAUCCAUCAG | 329 |
| GCCUGGUCAAUGUUAUCCAU | 330 |
| AGCCUGGUCAAUGUUAUCCA | 331 |
| GAGCCUGGUCAAUGUUAUCC | 332 |
| UGAGCCUGGUCAAUGUUAUC | 333 |
| AAUCAGUUCCCAGUCCAGCU | 334 |
| AAAUCAGUUCCCAGUCCAGC | 335 |
| UAAAUCAGUUCCCAGUCCAG | 336 |
| AUAAAUCAGUUCCCAGUCCA | 337 |
| CAUCCUCUUCCUACCAAUAU | 338 |
| UGCAUCCUCUUCCUACCAAU | 339 |
| UUGCAUCCUCUUCCUACCAA | 340 |
| CUUGCAUCCUCUUCCUACCA | 341 |
| ACUUGCAUCCUCUUCCUACC | 342 |
| UACUUGCAUCCUCUUCCUAC | 343 |
| CCUUUACUUGCAUCCUCUUC | 344 |
| CUCCUUUACUUGCAUCCUCU | 345 |
| GCUCCUUUACUUGCAUCCUC | 346 |
| GGCUCCUUUACUUGCAUCCU | 347 |
| CUGGCUCCUUUACUUGCAUC | 348 |
| UCUGGCUCCUUUACUUGCAU | 349 |
| CUCUGGCUCCUUUACUUGCA | 350 |
| UCUCUGGCUCCUUUACUUGC | 351 |
| UUCUCUGGCUCCUUUACUUG | 352 |
| GCUUUCUCUGGCUCCUUUAC | 353 |
| ACAUUGGGCACUGCUUUCUC | 354 |
| CCACAUUGGGCACUGCUUUC | 355 |
| GCCACAUUGGGCACUGCUUU | 356 |
| CCAGGUUUGCCACAUUGGGC | 357 |
| ACCAGGUUUGCCACAUUGGG | 358 |
| CAGUAGGAAUAGUCGGCUUC | 359 |
| CCAGUAGGAAUAGUCGGCUU | 360 |
| CCAACCAGCUUCUGUGCUCC | 361 |
| UCCAACCAGCUUCUGUGCUC | 362 |
| GAUUGGCUCCAACCAGCUUC | 363 |
| GGAUUGGCUCCAACCAGCUU | 364 |
| AAGGAUUGGCUCCAACCAGC | 365 |
| UCCACUGGCAGCAUCUUCCC | 366 |
| UCAUCCACUGGCAGCAUCUU | 367 |
| ACUCAUCCACUGGCAGCAUC | 368 |
| AGAAACUCAUCCACUGGCAG | 369 |
| GGCAGAAACUCAUCCACUGG | 370 |
| ACUGGCAGAAACUCAUCCAC | 371 |
| GACUGGCAGAAACUCAUCCA | 372 |
| UGACUGGCAGAAACUCAUCC | 373 |
| UACAUGACUGGCAGAAACUC | 374 |
| GUACAUGACUGGCAGAAACU | 375 |
| UACUCCUUGUACUCGGCUAC | 376 |
| AUACUCCUUGUACUCGGCUA | 377 |
| AAUACUCCUUGUACUCGGCU | 378 |
| UAAUACUCCUUGUACUCGGC | 379 |
| CAUAAUACUCCUUGUACUCG | 380 |
| CCCUGGAUUCAUAAUACUCC | 381 |
| UCCCUGGAUUCAUAAUACUC | 382 |
| GUCCCUGGAUUCAUAAUACU | 383 |
| GGUCCCUGGAUUCAUAAUAC | 384 |
| AGGUCCCUGGAUUCAUAAUA | 385 |
| CAGGUCCCUGGAUUCAUAAU | 386 |
| UCAGGUCCCUGGAUUCAUAA | 387 |
| UUCAGGUCCCUGGAUUCAUA | 388 |
| UUUCAGGUCCCUGGAUUCAU | 389 |
| AGGCUUUCAGGUCCCUGGAU | 390 |
| AAGGCUUUCAGGUCCCUGGA | 391 |
| GAAGGCUUUCAGGUCCCUGG | 392 |
| AGAAGGCUUUCAGGUCCCUG | 393 |
| AGAUGAGCAAGGGUUCUGCA | 394 |
| UAGAUGAGCAAGGGUUCUGC | 395 |
| GUAGAUGAGCAAGGGUUCUG | 396 |
| GGUAGAUGAGCAAGGGUUCU | 397 |
| GGGUAGAUGAGCAAGGGUUC | 398 |
| UAGGGUAGAUGAGCAAGGGU | 399 |
| CGUAGGGUAGAUGAGCAAGG | 400 |
| GCGUAGGGUAGAUGAGCAAG | 401 |
| GUGCGUAGGGUAGAUGAGCA | 402 |
| AGUGCGUAGGGUAGAUGAGC | 403 |
| UAGUGCGUAGGGUAGAUGAG | 404 |
| GUAGUGCGUAGGGUAGAUGA | 405 |
| UGUAGUGCGUAGGGUAGAUG | 406 |
| GUGUAGUGCGUAGGGUAGAU | 407 |
| UGUGUAGUGCGUAGGGUAGA | 408 |
| CUGUGUAGUGCGUAGGGUAG | 409 |
| CCUGUGUAGUGCGUAGGGUA | 410 |
| GCCUGUGUAGUGCGUAGGGU | 411 |
| UGGCCUGUGUAGUGCGUAGG | 412 |
| CUGGCCUGUGUAGUGCGUAG | 413 |
| GCUGGCCUGUGUAGUGCGUA | 414 |
| UCUCCGUGUCACUCAGGUAC | 415 |
| GUCUCCGUGUCACUCAGGUA | 416 |
| AGGUCUCCGUGUCACUCAGG | 417 |
| GAGGUCUCCGUGUCACUCAG | 418 |
| GGAGGUCUCCGUGUCACUCA | 419 |
| UGGAGGUCUCCGUGUCACUC | 420 |
| UGGUGGAGGUCUCCGUGUCA | 421 |
| AUGGUGGAGGUCUCCGUGUC | 422 |
| GAUGGUGGAGGUCUCCGUGU | 423 |
| CAGAUGGUGGAGGUCUCCGU | 424 |
| AUUGUCCCAGAUGGUGGAGG | 425 |
| GUCUCAUUGUCCCAGAUGGU | 426 |
| CUGUCUCAUUGUCCCAGAUG | 427 |
| ACUGUCUCAUUGUCCCAGAU | 428 |
| CACUGUCUCAUUGUCCCAGA | 429 |
| CCACUGUCUCAUUGUCCCAG | 430 |
| UGUCCUAUCCCAGUCGGUGG | 431 |
| GUGUCCUAUCCCAGUCGGUG | 432 |
| UGUGUCCUAUCCCAGUCGGU | 433 |
| AUGUGUCCUAUCCCAGUCGG | 434 |
| CAUGUGUCCUAUCCCAGUCG | 435 |
| GCAUGUGUCCUAUCCCAGUC | 436 |
| GGCAUGUGUCCUAUCCCAGU | 437 |
| AGGCAUGUGUCCUAUCCCAG | 438 |
| CAGGCAUGUGUCCUAUCCCA | 439 |
| CCAGGCAUGUGUCCUAUCCC | 440 |
| UCCAGGCAUGUGUCCUAUCC | 441 |
| CUUCCAGGCAUGUGUCCUAU | 442 |
| CGGGACUUCCAGGCAUGUGU | 443 |
| UCCGGGACUUCCAGGCAUGU | 444 |
| CUUCCGGGACUUCCAGGCAU | 445 |
| UUGCUUCCGGGACUUCCAGG | 446 |
| CUUUGCUUCCGGGACUUCCA | 447 |
| GCUUUGCUUCCGGGACUUCC | 448 |
| GGCUUUGCUUCCGGGACUUC | 449 |
| CGGCUUUGCUUCCGGGACUU | 450 |
| AUGCGGCUUUGCUUCCGGGA | 451 |
| AGAUGCGGCUUUGCUUCCGG | 452 |
| UAGAUGCGGCUUUGCUUCCG | 453 |
| GUAGAUGCGGCUUUGCUUCC | 454 |
| UGUAGAUGCGGCUUUGCUUC | 455 |
| UGCUGUAGAUGCGGCUUUGC | 456 |
| UUGCUGUAGAUGCGGCUUUG | 457 |
| AUUGCUGUAGAUGCGGCUUU | 458 |
| CAUUGCUGUAGAUGCGGCUU | 459 |
| UCUUGGCAUUGCUGUAGAUG | 460 |
| UUCUUGGCAUUGCUGUAGAU | 461 |
| CUCUGUGUUCUUGGCAUUGC | 462 |
| AGGGCCUCUGUGUUCUUGGC | 463 |
| CACAGUGUCCAGGGAGGUUG | 464 |
| GCACAGUGUCCAGGGAGGUU | 465 |
| AAGGCACAGUGUCCAGGGAG | 466 |
| UGAAGGCACAGUGUCCAGGG | 467 |
| UUGAAGGCACAGUGUCCAGG | 468 |
| CCCUUGAAGGCACAGUGUCC | 469 |
| AUCCCUUGAAGGCACAGUGU | 470 |
| UCAUCCCUUGAAGGCACAGU | 471 |
| CUCAUCCCUUGAAGGCACAG | 472 |
| GCUCAUCCCUUGAAGGCACA | 473 |
| AGCUCAUCCCUUGAAGGCAC | 474 |
| UAGCUCAUCCCUUGAAGGCA | 475 |
| AUAGCUCAUCCCUUGAAGGC | 476 |
| CUUCAUAGCUCAUCCCUUGA | 477 |
| GUUGAACUGAUGUGGGCCAC | 478 |
| UGUUGAACUGAUGUGGGCCA | 479 |
| AUGUUGAACUGAUGUGGGCC | 480 |
| GAUGUUGAACUGAUGUGGGC | 481 |
| GGAUGUUGAACUGAUGUGGG | 482 |
| CCAGAGGAUGUUGAACUGAU | 483 |
| ACCAGAGGAUGUUGAACUGA | 484 |
| AACCAGAGGAUGUUGAACUG | 485 |
| AAACCAGAGGAUGUUGAACU | 486 |
| AAAACCAGAGGAUGUUGAAC | 487 |
| CUGGAGCAAACAGAUGAAUA | 488 |
| ACUGGAGCAAACAGAUGAAU | 489 |
| CUGUGACCACUAAGAACAAA | 490 |
| UGACUGUGACCACUAAGAAC | 491 |
| GAUGACUGUGACCACUAAGA | 492 |
| AGAUGACUGUGACCACUAAG | 493 |
| UAGAUGACUGUGACCACUAA | 494 |
| UUAGAUGACUGUGACCACUA | 495 |
| GUUAGAUGACUGUGACCACU | 496 |
| GGUUAGAUGACUGUGACCAC | 497 |
| UUGGUUAGAUGACUGUGACC | 498 |
| UUUGGUUAGAUGACUGUGAC | 499 |
| ACUUUGGUUAGAUGACUGUG | 500 |
| GAUCACUUUGGUUAGAUGAC | 501 |
| CACACUAGAUCACUUUGGUU | 502 |
| UUCAGCCGUCUUGGGAAAUU | 503 |
| UCUUUCAGCCGUCUUGGGAA | 504 |
| GUCUUUCAGCCGUCUUGGGA | 505 |
| UGUCUUUCAGCCGUCUUGGG | 506 |
| CUGUCUUUCAGCCGUCUUGG | 507 |
| UUAGGUGUCUGGAUUACAGU | 508 |
| AUUAGGUGUCUGGAUUACAG | 509 |
| GAAGAAUUAGGUGUCUGGAU | 510 |
| UGAAGAAUUAGGUGUCUGGA | 511 |
| CAUGAGUAGUGAACUGAAGA | 512 |
| ACAUGAGUAGUGAACUGAAG | 513 |
| CACAUGAGUAGUGAACUGAA | 514 |
| UCAGUAUCACAUGAGUAGUG | 515 |
| UGGGAAUCAGUAUCACAUGA | 516 |
| GUGGGAAUCAGUAUCACAUG | 517 |
| CCUUAAUGUGGGAAUCAGUA | 518 |
| ACCUUAAUGUGGGAAUCAGU | 519 |
| GUUCAACCUUAAUGUGGGAA | 520 |
| GUUGUUCAACCUUAAUGUGG | 521 |
| GAUGUGACAGCUCGGUGAUC | 522 |
| UGAUGUGACAGCUCGGUGAU | 523 |
| CUGAUGUGACAGCUCGGUGA | 524 |
| CAUAUUUGCUGAUGUGACAG | 525 |
| GCCUUGACUACAUAUUUGCU | 526 |
| UGCCUUGACUACAUAUUUGC | 527 |
| CAAUAAGUGUGGUCUAGUUG | 528 |
| GGACAAACUAGACCAAUAAG | 529 |
| CGGACAAACUAGACCAAUAA | 530 |
| ACGGACAAACUAGACCAAUA | 531 |
| AACGGACAAACUAGACCAAU | 532 |
| AAACGGACAAACUAGACCAA | 533 |
| AAAACGGACAAACUAGACCA | 534 |
| GCACACACAAGUUUUCAAUG | 535 |
| CCAAAAGUUGCACACACAAG | 536 |
| GACUUGUGACAGAAUCCUUU | 537 |
| AAGACUUGUGACAGAAUCCU | 538 |
| UAAGACUUGUGACAGAAUCC | 539 |
| GGAUAACAGGGACUAAGAUU | 540 |
| UGGAUAACAGGGACUAAGAU | 541 |
| CUGGAUAACAGGGACUAAGA | 542 |
| UGCCAUGAUGGUCACAGGCC | 543 |
| CUGCCAUGAUGGUCACAGGC | 544 |
| CAACUGCCAUGAUGGUCACA | 545 |
| CCAACUGCCAUGAUGGUCAC | 546 |
| UCCAACUGCCAUGAUGGUCA | 547 |
| CUCCAACUGCCAUGAUGGUC | 548 |
| CUGGUCACCUCUAUAUGAGA | 549 |
| ACUGGUCACCUCUAUAUGAG | 550 |
| AAACUGGUCACCUCUAUAUG | 551 |
| UGGCAAACUGGUCACCUCUA | 552 |
| AUGGCAAACUGGUCACCUCU | 553 |
| CAUGGCAAACUGGUCACCUC | 554 |
| ACAUGGCAAACUGGUCACCU | 555 |
| CACAUGGCAAACUGGUCACC | 556 |
| CCACAUGGCAAACUGGUCAC | 557 |
| UCCACAUGGCAAACUGGUCA | 558 |
| AUCCACAUGGCAAACUGGUC | 559 |
| UAUAUCCACAUGGCAAACUG | 560 |
| CCUCAAAUACCUACACAAAC | 561 |
| UUUCCCUCAAAUACCUACAC | 562 |
| AAUAGAGCAUCCUGACUCGA | 563 |
| AAAUAGAGCAUCCUGACUCG | 564 |
| CCAGUCCUCACCCUUUAUAU | 565 |
| ACAGCCAGUCCUCACCCUUU | 566 |
| GAUGCACAGCCAGUCCUCAC | 567 |
| UGAAGCUCUGUAGCAGCGCG | 568 |
| GUGAAGCUCUGUAGCAGCGC | 569 |
| CGUGAAGCUCUGUAGCAGCG | 570 |
| CUGAAAAUGUGCUCUGUCUC | 571 |
| GCCUGAAAAUGUGCUCUGUC | 572 |
| CAAUAUCUUCGCCCAUUUUG | 573 |
| GACAAUAUCUUCGCCCAUUU | 574 |
| AGACAAUAUCUUCGCCCAUU | 575 |
| GGAAGUCUGCAACAUCUGUU | 576 |
| GUGGAAGUCUGCAACAUCUG | 577 |
| GAAUCAGAUUGCCGAACCAA | 578 |
| AGAAUCAGAUUGCCGAACCA | 579 |
| GAGAAUCAGAUUGCCGAACC | 580 |
| GGAGAAUCAGAUUGCCGAAC | 581 |
| CAGGAGAAUCAGAUUGCCGA | 582 |
| UCAGGAGAAUCAGAUUGCCG | 583 |
| UUCAGGAGAAUCAGAUUGCC | 584 |
| CACAAGAGCCUGGCUGGGAA | 585 |
| CACCUGAGAUAGAGAAUCAU | 586 |
| UCACCUGAGAUAGAGAAUCA | 587 |
| CUCACCUGAGAUAGAGAAUC | 588 |
| UUCUGACCAGGUUUCUCACC | 589 |
| UUUCUGACCAGGUUUCUCAC | 590 |
| UGUUUCUGACCAGGUUUCUC | 591 |
| UUGUUUCUGACCAGGUUUCU | 592 |
| CUUUGUUUCUGACCAGGUUU | 593 |
| CCCUUUGUUUCUGACCAGGU | 594 |
| CCAGCCCUUUGUUUCUGACC | 595 |
| GACCAGCCCUUUGUUUCUGA | 596 |
| UGACCAGCCCUUUGUUUCUG | 597 |
| GGUGACCAGCCCUUUGUUUC | 598 |
| AGGUGACCAGCCCUUUGUUU | 599 |
| UCAGGUGACCAGCCCUUUGU | 600 |
| AUCAGGUGACCAGCCCUUUG | 601 |
| UAAAUCAGGUGACCAGCCCU | 602 |
| CUAAAUCAGGUGACCAGCCC | 603 |
| CCUAAAUCAGGUGACCAGCC | 604 |
| GCCUAAAUCAGGUGACCAGC | 605 |
| GGCCUAAAUCAGGUGACCAG | 606 |
| UGGCCUAAAUCAGGUGACCA | 607 |
| CUGGCCUAAAUCAGGUGACC | 608 |
| UGCUGGCCUAAAUCAGGUGA | 609 |
| UUGCUGGCCUAAAUCAGGUG | 610 |
| GUUGCUGGCCUAAAUCAGGU | 611 |
| CUGGUUGCUGGCCUAAAUCA | 612 |
| CCCUGGUUGCUGGCCUAAAU | 613 |
| UUCCCUGGUUGCUGGCCUAA | 614 |
| CUAAGAGCUUCCCUGGUUGC | 615 |
| UCUAAGAGCUUCCCUGGUUG | 616 |
| UUCUAAGAGCUUCCCUGGUU | 617 |
| AUUCUAAGAGCUUCCCUGGU | 618 |
| GAUUCUAAGAGCUUCCCUGG | 619 |
| GGAUUCUAAGAGCUUCCCUG | 620 |
| CUGGGAUUCUAAGAGCUUCC | 621 |
| CCUGGGAUUCUAAGAGCUUC | 622 |
| AGCAGAAAGGACUCUUAGGG | 623 |
| AAGCAGAAAGGACUCUUAGG | 624 |
| AAAGCAGAAAGGACUCUUAG | 625 |
| GAAAGCAGAAAGGACUCUUA | 626 |
| UCAAUCUGUGAAGAAAGCAG | 627 |
| UGUAGUCCAACUCUGCAUUU | 628 |
| GUGUAGUCCAACUCUGCAUU | 629 |
| CGUGUAGUCCAACUCUGCAU | 630 |
| AAUCGUGUAGUCCAACUCUG | 631 |
| AAAUCGUGUAGUCCAACUCU | 632 |
| GAAAUCGUGUAGUCCAACUC | 633 |
| AGAAAUCGUGUAGUCCAACU | 634 |
| AAGAAAUCGUGUAGUCCAAC | 635 |
| GAAGAAAUCGUGUAGUCCAA | 636 |
| GGAAGAAAUCGUGUAGUCCA | 637 |
| GGGAAGAAAUCGUGUAGUCC | 638 |
| UGGGAAGAAAUCGUGUAGUC | 639 |
| GUGGGAAGAAAUCGUGUAGU | 640 |
| GAGUGGGAAGAAAUCGUGUA | 641 |
| GGAGUGGGAAGAAAUCGUGU | 642 |
| AGAUUGUGGAGUGGGAAGAA | 643 |
| ACAGAUUGUGGAGUGGGAAG | 644 |
| AGGAUGACAGAUUGUGGAGU | 645 |
| UAGGAUGACAGAUUGUGGAG | 646 |
| CUAGGAUGACAGAUUGUGGA | 647 |
| ACUAGGAUGACAGAUUGUGG | 648 |
| GAUCUAUACUAGGAUGACAG | 649 |
| CACCAUGAUCUAUACUAGGA | 650 |
| CCACCAUGAUCUAUACUAGG | 651 |
| ACCACCAUGAUCUAUACUAG | 652 |
| GAAACCACCAUGAUCUAUAC | 653 |
| GAGGGAAACCACCAUGAUCU | 654 |
| UGAGGGAAACCACCAUGAUC | 655 |
| UUGAGGGAAACCACCAUGAU | 656 |
| UAAACUUGAGGGAAACCACC | 657 |
| AUAAACUUGAGGGAAACCAC | 658 |
| CAUAAACUUGAGGGAAACCA | 659 |
| ACAUAAACUUGAGGGAAACC | 660 |
| GGGCAUGAGAACAUAAACUU | 661 |
| AGGGCAUGAGAACAUAAACU | 662 |
| GAGGGCAUGAGAACAUAAAC | 663 |
| UGAGGGCAUGAGAACAUAAA | 664 |
| UUGAGGGCAUGAGAACAUAA | 665 |
| AUUGAGGGCAUGAGAACAUA | 666 |
| AGAUUGAGGGCAUGAGAACA | 667 |
| CAGAUUGAGGGCAUGAGAAC | 668 |
| ACAGAUUGAGGGCAUGAGAA | 669 |
| UACAGAUUGAGGGCAUGAGA | 670 |
| UUACAGAUUGAGGGCAUGAG | 671 |
| UUUACAGAUUGAGGGCAUGA | 672 |
| AUUUACAGAUUGAGGGCAUG | 673 |
| AUGGGAUGCCUGGGAGGGUU | 674 |
| UAUGGGAUGCCUGGGAGGGU | 675 |
| UGGUAUGGGAUGCCUGGGAG | 676 |
| CUGGUAUGGGAUGCCUGGGA | 677 |
| GUGCUGGUAUGGGAUGCCUG | 678 |
| GGUGCUGGUAUGGGAUGCCU | 679 |
| ACGGUGCUGGUAUGGGAUGC | 680 |
| AGGAACGGUGCUGGUAUGGG | 681 |
| AAGUGUGAAGCUCAGGGUUU | 682 |
| UAAGUGUGAAGCUCAGGGUU | 683 |
| UUAAGUGUGAAGCUCAGGGU | 684 |
| UUUAAGUGUGAAGCUCAGGG | 685 |
| GUUUAAGUGUGAAGCUCAGG | 686 |
| CCAUGAGUUUAAGUGUGAAG | 687 |
| CCCAUGAGUUUAAGUGUGAA | 688 |
| GUGGACUCUGCUCUGAAGGG | 689 |
| UGUGGACUCUGCUCUGAAGG | 690 |
| CUGUGGACUCUGCUCUGAAG | 691 |
| GUAUGUAGCACCACCCGCCU | 692 |
| UGUAUGUAGCACCACCCGCC | 693 |
| GUGUAUGUAGCACCACCCGC | 694 |
| UUGUGUAUGUAGCACCACCC | 695 |
| CUUGUGUAUGUAGCACCACC | 696 |
| GUCUGGCUUAAAGUGUAUCU | 697 |
| UGUCUGGCUUAAAGUGUAUC | 698 |
| UUAGGUGUCUGGCUUAAAGU | 699 |
| AUCAGUAUCACAUGGGCAGU | 700 |
| AAUCAGUAUCACAUGGGCAG | 701 |
| CAAUCAGUAUCACAUGGGCA | 702 |
| GCAAUCAGUAUCACAUGGGC | 703 |
| UGGCAAUCAGUAUCACAUGG | 704 |
| CCUUAAUGUGGCAAUCAGUA | 705 |
| ACCUUAAUGUGGCAAUCAGU | 706 |
| AACCUUAAUGUGGCAAUCAG | 707 |
| CAACCUUAAUGUGGCAAUCA | 708 |
| UCAACCUUAAUGUGGCAAUC | 709 |
| GUUCAACCUUAAUGUGGCAA | 710 |
| UGUUCAACCUUAAUGUGGCA | 711 |
| CUGUUCAACCUUAAUGUGGC | 712 |
| GCUGUUCAACCUUAAUGUGG | 713 |
| CAUGCUGUUCAACCUUAAUG | 714 |
| CCAUGCUGUUCAACCUUAAU | 715 |
| GCCAUGCUGUUCAACCUUAA | 716 |
| AGACUCUGAGCCAUGCUGUU | 717 |
| UAGACUCUGAGCCAUGCUGU | 718 |
| CUAGACUCUGAGCCAUGCUG | 719 |
| UGAUGAGACAGCUUGGUGAU | 720 |
| GGUGAUGAGACAGCUUGGUG | 721 |
| UGGUGAUGAGACAGCUUGGU | 722 |
| UUGGUGAUGAGACAGCUUGG | 723 |
| UUUGGUGAUGAGACAGCUUG | 724 |
| AUUUGGUGAUGAGACAGCUU | 725 |
| UAUUUGGUGAUGAGACAGCU | 726 |
| CUAUUUGGUGAUGAGACAGC | 727 |
| ACCUAUUUGGUGAUGAGACA | 728 |
| ACUACCUAUUUGGUGAUGAG | 729 |
| UGACUACCUAUUUGGUGAUG | 730 |
| CUUGACUACCUAUUUGGUGA | 731 |
| CCUUGACUACCUAUUUGGUG | 732 |
| CUGCCUUGACUACCUAUUUG | 733 |
| GGCUGCCUUGACUACCUAUU | 734 |
| AGGCUGCCUUGACUACCUAU | 735 |
| UGCCUCUUGUCCUAAAGUGG | 736 |
| CUGCCUCUUGUCCUAAAGUG | 737 |
| GCUGCCUCUUGUCCUAAAGU | 738 |
| AGCUGCCUCUUGUCCUAAAG | 739 |
| AAGCUGCCUCUUGUCCUAAA | 740 |
| UCUGGUGGAAGGCAAGCUGC | 741 |
| CGUCUGGUGGAAGGCAAGCU | 742 |
| CUGGUCAGUGUAGAAGGGUA | 743 |
| UAGCUUGCUGGUCAGUGUAG | 744 |
| CUAGCUUGCUGGUCAGUGUA | 745 |
| CCUAGCUUGCUGGUCAGUGU | 746 |
| GCCUAGCUUGCUGGUCAGUG | 747 |
| GAGUUGGGUGAGUUCCCUUU | 748 |
| AGAGUUGGGUGAGUUCCCUU | 749 |
| UAGAGUUGGGUGAGUUCCCU | 750 |
| UUAGAGUUGGGUGAGUUCCC | 751 |
| UUUAGAGUUGGGUGAGUUCC | 752 |
| ACAAUUUAGAGUUGGGUGAG | 753 |
| CACAAUUUAGAGUUGGGUGA | 754 |
| GCACAAUUUAGAGUUGGGUG | 755 |
| GGCACAAUUUAGAGUUGGGU | 756 |
| CGGCACAAUUUAGAGUUGGG | 757 |
| GCGGCACAAUUUAGAGUUGG | 758 |
| AGCGGCACAAUUUAGAGUUG | 759 |
| UAAGCGGCACAAUUUAGAGU | 760 |
| AGUCUAAGCGGCACAAUUUA | 761 |
| AAGUCUAAGCGGCACAAUUU | 762 |
| UAAGUCUAAGCGGCACAAUU | 763 |
| CUAAGUCUAAGCGGCACAAU | 764 |
| GCUAAGUCUAAGCGGCACAA | 765 |
| AGCUAAGUCUAAGCGGCACA | 766 |
| CAGCUAAGUCUAAGCGGCAC | 767 |
| ACAGCUAAGUCUAAGCGGCA | 768 |
| GACAGCUAAGUCUAAGCGGC | 769 |
| CUGACAGCUAAGUCUAAGCG | 770 |
| ACUGACAGCUAAGUCUAAGC | 771 |
| CACUGACAGCUAAGUCUAAG | 772 |
| ACACUGACAGCUAAGUCUAA | 773 |
| CACACUGACAGCUAAGUCUA | 774 |
| UCACACUGACAGCUAAGUCU | 775 |
| GUGGGAAAGGAAGUCACACU | 776 |
| GGUGGGAAAGGAAGUCACAC | 777 |
| AGGAAUUUUCACUCGCUCCC | 778 |
| AAGGAAUUUUCACUCGCUCC | 779 |
| UAAGGAAUUUUCACUCGCUC | 780 |
| CUAAGGAAUUUUCACUCGCU | 781 |
| ACCUAAGGAAUUUUCACUCG | 782 |
| CACCUAAGGAAUUUUCACUC | 783 |
| ACCCAAGGAAAUCUUAGGAA | 784 |
| UACCCAAGGAAAUCUUAGGA | 785 |
| ACCAGAUACCCAAGGAAAUC | 786 |
| CAUGCACACACUCAAAUAUG | 787 |
| ACACAUGCACACACUCAAAU | 788 |
| ACCCAAACUUCCUUCAACCC | 789 |
| AACCCAAACUUCCUUCAACC | 790 |
| CAACCCAAACUUCCUUCAAC | 791 |
| AUCAACCCAAACUUCCUUCA | 792 |
| UUAAAUCUGUCAGACCAGCU | 793 |
| CUUAAAUCUGUCAGACCAGC | 794 |
| UCUUAAAUCUGUCAGACCAG | 795 |
| ACAGUCCUAGUCUAAAAUGC | 796 |
| CAGUAGAACAGUCCUAGUCU | 797 |
| ACAGUAGAACAGUCCUAGUC | 798 |
| CACAGUAGAACAGUCCUAGU | 799 |
| UCACAGUAGAACAGUCCUAG | 800 |
| UUCACAGUAGAACAGUCCUA | 801 |
| CUUCACAGUAGAACAGUCCU | 802 |
| CAGAACUUUCUUCACAGUAG | 803 |
| GACAGAACUUUCUUCACAGU | 804 |
| GGGCUAAAGGAGACAGAACU | 805 |
| CGGGCUAAAGGAGACAGAAC | 806 |
| CCGGGCUAAAGGAGACAGAA | 807 |
| ACCGGGCUAAAGGAGACAGA | 808 |
| AACCGGGCUAAAGGAGACAG | 809 |
| AAACCGGGCUAAAGGAGACA | 810 |
| CAAACCGGGCUAAAGGAGAC | 811 |
| ACAAACCGGGCUAAAGGAGA | 812 |
| AACAAACCGGGCUAAAGGAG | 813 |
| AAACAAACCGGGCUAAAGGA | 814 |
| GAAACAAACCGGGCUAAAGG | 815 |
| AGAAACAAACCGGGCUAAAG | 816 |
| GAGAAACAAACCGGGCUAAA | 817 |
| GGAGAAACAAACCGGGCUAA | 818 |
| GGGAGAAACAAACCGGGCUA | 819 |
| AGGGAGAAACAAACCGGGCU | 820 |
| CAGGGAGAAACAAACCGGGC | 821 |
| GAGCAGGGAGAAACAAACCG | 822 |
| AGAAAAGAACACUGCUUGGG | 823 |
| GUCACAUCUGCGGCUCACAG | 824 |
| AGUCACAUCUGCGGCUCACA | 825 |
| AAGUCACAUCUGCGGCUCAC | 826 |
| AAAGUCACAUCUGCGGCUCA | 827 |
| AAAAGUCACAUCUGCGGCUC | 828 |
| GAUUGCUGAAGAGAUGACUU | 829 |
| UGGAUUGCUGAAGAGAUGAC | 830 |
| UCUGGAUUGCUGAAGAGAUG | 831 |
| GAACCUCUGGAUUGCUGAAG | 832 |
| GGAACCUCUGGAUUGCUGAA | 833 |
| AGGAACCUCUGGAUUGCUGA | 834 |
| AAGGAACCUCUGGAUUGCUG | 835 |
| CAAGGAACCUCUGGAUUGCU | 836 |
| UCAAGGAACCUCUGGAUUGC | 837 |
| GUCAAGGAACCUCUGGAUUG | 838 |
| GACAAAUAAUGAGGUCAAGG | 839 |
| GGACAAAUAAUGAGGUCAAG | 840 |
| AGGGAGAGAUAGGACAAAUA | 841 |
| UAAGGGAGAGAUAGGACAAA | 842 |
| AUAAGGGAGAGAUAGGACAA | 843 |
| AGGACUAUAAGGGAGAGAUA | 844 |
| UUAGGACUAUAAGGGAGAGA | 845 |
| GUCUUGGCUUAGGACUAUAA | 846 |
| UGUCUUGGCUUAGGACUAUA | 847 |
| AUGUCUUGGCUUAGGACUAU | 848 |
| AAUGUCUUGGCUUAGGACUA | 849 |
| AAAUGUCUUGGCUUAGGACU | 850 |
| CAAAUGUCUUGGCUUAGGAC | 851 |
| GUCAAAUGUCUUGGCUUAGG | 852 |
| GGUCAAAUGUCUUGGCUUAG | 853 |
| AGGUCAAAUGUCUUGGCUUA | 854 |
| AAGGUCAAAUGUCUUGGCUU | 855 |
| AAAGGUCAAAUGUCUUGGCU | 856 |
| CAAAGGUCAAAUGUCUUGGC | 857 |
| CACAUGACACUGCAAAGGUC | 858 |
| UCACAUGACACUGCAAAGGU | 859 |
| CUCACAUGACACUGCAAAGG | 860 |
| CCUCACAUGACACUGCAAAG | 861 |
| CCCUCACAUGACACUGCAAA | 862 |
| GCCCUCACAUGACACUGCAA | 863 |
| ACGCCCUCACAUGACACUGC | 864 |
| CUGACGCCCUCACAUGACAC | 865 |
| ACUGACGCCCUCACAUGACA | 866 |
| UACUGACGCCCUCACAUGAC | 867 |
| AUACUGACGCCCUCACAUGA | 868 |
| UAUACUGACGCCCUCACAUG | 869 |
| CUAUACUGACGCCCUCACAU | 870 |
| UCUAUACUGACGCCCUCACA | 871 |
| CUCUAUACUGACGCCCUCAC | 872 |
| CCUCUAUACUGACGCCCUCA | 873 |
| GCCUCUAUACUGACGCCCUC | 874 |
| GGCCUCUAUACUGACGCCCU | 875 |
| UGCCAGGCCCAGAUGCAAAG | 876 |
| CAGGGUUUAGCCUCCAGAGG | 877 |
| ACAGGGUUUAGCCUCCAGAG | 878 |
| GACAGGGUUUAGCCUCCAGA | 879 |
| AGACAGGGUUUAGCCUCCAG | 880 |
| CCAGACAGGGUUUAGCCUCC | 881 |
| UCCAGACAGGGUUUAGCCUC | 882 |
| AUCCAGACAGGGUUUAGCCU | 883 |
| AAUCCAGACAGGGUUUAGCC | 884 |
| AAAUCCAGACAGGGUUUAGC | 885 |
| GAAAUCCAGACAGGGUUUAG | 886 |
| AGAAAUCCAGACAGGGUUUA | 887 |
| GAGAAAUCCAGACAGGGUUU | 888 |
| AAGAGAAAUCCAGACAGGGU | 889 |
| CAAGAGAAAUCCAGACAGGG | 890 |
| AUCCCAAGAGAAAUCCAGAC | 891 |
| GUCUGUCCAGAAGAUCCCAC | 892 |
| UUGUCUGUCCAGAAGAUCCC | 893 |
| CGGUUGUCUGUCCAGAAGAU | 894 |
| UCACGGUUGUCUGUCCAGAA | 895 |
| GUCACGGUUGUCUGUCCAGA | 896 |
| UGUCACGGUUGUCUGUCCAG | 897 |
| AUGUCACGGUUGUCUGUCCA | 898 |
| GAUGUCACGGUUGUCUGUCC | 899 |
| UGAUGUCACGGUUGUCUGUC | 900 |
| CUGAUGUCACGGUUGUCUGU | 901 |
| GCUGAUGUCACGGUUGUCUG | 902 |
| UGCUGAUGUCACGGUUGUCU | 903 |
| CUGCUGAUGUCACGGUUGUC | 904 |
| ACUGCUGAUGUCACGGUUGU | 905 |
| CACUGCUGAUGUCACGGUUG | 906 |
| GCACUGCUGAUGUCACGGUU | 907 |
| UGUUCAGUCCACACACAGCA | 908 |
| CAAAGUGCAGGUGUUCAGUC | 909 |
| GCAAAGUGCAGGUGUUCAGU | 910 |
| GCGUGUCCUCUGCAAAGUGC | 911 |
| CAGCGUGUCCUCUGCAAAGU | 912 |
| UGUCCACUCUUUCUUGUUCU | 913 |
| GUGUCCACUCUUUCUUGUUC | 914 |
| CGCAAGACAGAUGAUGCAGG | 915 |
| CACGCAAGACAGAUGAUGCA | 916 |
| GCACGCAAGACAGAUGAUGC | 917 |
| AGCACGCAAGACAGAUGAUG | 918 |
| UAGCACGCAAGACAGAUGAU | 919 |
| AAUAGCACGCAAGACAGAUG | 920 |
| AAAUAGCACGCAAGACAGAU | 921 |
| GAAAUAGCACGCAAGACAGA | 922 |
| UGAAAUAGCACGCAAGACAG | 923 |
| CUGAAAUAGCACGCAAGACA | 924 |
| UCUGAAAUAGCACGCAAGAC | 925 |
| CUCUGAAAUAGCACGCAAGA | 926 |
| ACUCUGAAAUAGCACGCAAG | 927 |
| CACUCUGAAAUAGCACGCAA | 928 |
| GCUCCAGAAGGCAAAUAGUU | 929 |

TABLE 2
siRNA molecules

| | SEQ | | SEQ |
|---|---|---|---|
| | ID | | ID |
| Sense Sequence | NO: | Antisense Sequence | NO: |
| CAACUCGCGGCUCUAGGGA | 930 | UCCCUAGAGCCGCGAGUUG | 931 |
| AACUCGCGGCUCUAGGGAA | 932 | UUCCCUAGAGCCGCGAGUU | 933 |
| ACUCGCGGCUCUAGGGAAG | 934 | CUUCCCUAGAGCCGCGAGU | 935 |
| CUAGGGAAGGCCACAGACC | 936 | GGUCUGUGGCCUUCCCUAG | 937 |
| UAGGGAAGGCCACAGACCU | 938 | AGGUCUGUGGCCUUCCCUA | 939 |
| AGGGAAGGCCACAGACCUC | 940 | GAGGUCUGUGGCCUUCCCU | 941 |
| GGGAAGGCCACAGACCUCA | 942 | UGAGGUCUGUGGCCUUCCC | 943 |
| GGAAGGCCACAGACCUCAG | 944 | CUGAGGUCUGUGGCCUUCC | 945 |
| CAGACCUCAGCUGUACGAG | 946 | CUCGUACAGCUGAGGUCUG | 947 |
| AGACCUCAGCUGUACGAGC | 948 | GCUCGUACAGCUGAGGUCU | 949 |
| GACCUCAGCUGUACGAGCG | 950 | CGCUCGUACAGCUGAGGUC | 951 |
| ACCUCAGCUGUACGAGCGG | 952 | CCGCUCGUACAGCUGAGGU | 953 |
| CCUCAGCUGUACGAGCGGA | 954 | UCCGCUCGUACAGCUGAGG | 955 |
| CUCAGCUGUACGAGCGGAA | 956 | UUCCGCUCGUACAGCUGAG | 957 |
| CCUCGGCCACUACUGUCUG | 958 | CAGACAGUAGUGGCCGAGG | 959 |
| CUCGGCCACUACUGUCUGC | 960 | GCAGACAGUAGUGGCCGAG | 961 |
| UCGGCCACUACUGUCUGCG | 962 | CGCAGACAGUAGUGGCCGA | 963 |
| CGGCCACUACUGUCUGCGA | 964 | UCGCAGACAGUAGUGGCCG | 965 |
| GGCCACUACUGUCUGCGAG | 966 | CUCGCAGACAGUAGUGGCC | 967 |
| GCCACUACUGUCUGCGAGC | 968 | GCUCGCAGACAGUAGUGGC | 969 |
| CCACUACUGUCUGCGAGCC | 970 | GGCUCGCAGACAGUAGUGG | 971 |
| CACUACUGUCUGCGAGCCC | 972 | GGGCUCGCAGACAGUAGUG | 973 |
| ACUACUGUCUGCGAGCCCG | 974 | CGGGCUCGCAGACAGUAGU | 975 |
| CUACUGUCUGCGAGCCCGA | 976 | UCGGGCUCGCAGACAGUAG | 977 |
| UACUGUCUGCGAGCCCGAG | 978 | CUCGGGCUCGCAGACAGUA | 979 |
| GGUCGCUACUGCUCCUCUC | 980 | GAGAGGAGCAGUAGCGACC | 981 |
| UGCUCCUCUCCUCAGCCCU | 982 | AGGGCUGAGGAGAGGAGCA | 983 |
| ACACGCUGCCGCACUUCCU | 984 | AGGAAGUGCGGCAGCGUGU | 985 |
| ACUUCCUCGGCUGCCUGGA | 986 | UCCAGGCAGCCGAGGAAGU | 987 |
| CCCAAGAGCAGGAUGGCCA | 988 | UGGCCAUCCUGCUCUUGGG | 989 |
| CCAAGAGCAGGAUGGCCAU | 990 | AUGGCCAUCCUGCUCUUGG | 991 |
| CAAGAGCAGGAUGGCCAUC | 992 | GAUGGCCAUCCUGCUCUUG | 993 |
| AAGAGCAGGAUGGCCAUCU | 994 | AGAUGGCCAUCCUGCUCUU | 995 |
| CAGGAUGGCCAUCUGGGCA | 996 | UGCCCAGAUGGCCAUCCUG | 997 |
| AAAUAUUCAGGGAGUGGUU | 998 | AACCACUCCCUGAAUAUUU | 999 |
| AAUAUUCAGGGAGUGGUUG | 1000 | CAACCACUCCCUGAAUAUU | 1001 |
| AUAUUCAGGGAGUGGUUGA | 1002 | UCAACCACUCCCUGAAUAU | 1003 |
| GACUCUAUCACUAUGUGGA | 1004 | UCCACAUAGUGAUAGAGUC | 1005 |
| ACUCUAUCACUAUGUGGAG | 1006 | CUCCACAUAGUGAUAGAGU | 1007 |
| CUAUGUGGAGUGGAGGCCU | 1008 | AGGCCUCCACUCCACAUAG | 1009 |
| UAUGUGGAGUGGAGGCCUA | 1010 | UAGGCCUCCACUCCACAUA | 1011 |
| AUGUGGAGUGGAGGCCUAU | 1012 | AUAGGCCUCCACUCCACAU | 1013 |
| UGUGGAGUGGAGGCCUAUG | 1014 | CAUAGGCCUCCACUCCACA | 1015 |
| GUGGAGUGGAGGCCUAUGG | 1016 | CCAUAGGCCUCCACUCCAC | 1017 |
| UGGAGUGGAGGCCUAUGGA | 1018 | UCCAUAGGCCUCCACUCCA | 1019 |
| GGAGUGGAGGCCUAUGGAU | 1020 | AUCCAUAGGCCUCCACUCC | 1021 |
| GAGUGGAGGCCUAUGGAUG | 1022 | CAUCCAUAGGCCUCCACUC | 1023 |
| AGUGGAGGCCUAUGGAUGA | 1024 | UCAUCCAUAGGCCUCCACU | 1025 |
| GUGGAGGCCUAUGGAUGAA | 1026 | UUCAUCCAUAGGCCUCCAC | 1027 |
| AACCAGAGUCUUACCCUGA | 1028 | UCAGGGUAAGACUCUGGUU | 1029 |
| ACCAGAGUCUUACCCUGAU | 1030 | AUCAGGGUAAGACUCUGGU | 1031 |
| CCAGAGUCUUACCCUGAUG | 1032 | CAUCAGGGUAAGACUCUGG | 1033 |
| CAGAGUCUUACCCUGAUGA | 1034 | UCAUCAGGGUAAGACUCUG | 1035 |
| AGAGUCUUACCCUGAUGAA | 1036 | UUCAUCAGGGUAAGACUCU | 1037 |
| UGGACCAAAGCACUGGCCA | 1038 | UGGCCAGUGCUUUGGUCCA | 1039 |
| GGACCAAAGCACUGGCCAA | 1040 | UUGGCCAGUGCUUUGGUCC | 1041 |
| ACCUCCCGGUUUGCCCAUG | 1042 | CAUGGGCAAACCGGGAGGU | 1043 |
| CCUCCCGGUUUGCCCAUGU | 1044 | ACAUGGGCAAACCGGGAGG | 1045 |
| CUCCCGGUUUGCCCAUGUG | 1046 | CACAUGGGCAAACCGGGAG | 1047 |
| CGGUUUGCCCAUGUGAUGA | 1048 | UCAUCACAUGGGCAAACCG | 1049 |
| GGUUUGCCCAUGUGAUGAA | 1050 | UUCAUCACAUGGGCAAACC | 1051 |
| ACUACGACAGGCAGCCCUU | 1052 | AAGGGCUGCCUGUCGUAGU | 1053 |
| CUACGACAGGCAGCCCUUC | 1054 | GAAGGGCUGCCUGUCGUAG | 1055 |
| UACGACAGGCAGCCCUUCG | 1056 | CGAAGGGCUGCCUGUCGUA | 1057 |
| ACGACAGGCAGCCCUUCGA | 1058 | UCGAAGGGCUGCCUGUCGU | 1059 |
| CGACAGGCAGCCCUUCGAA | 1060 | UUCGAAGGGCUGCCUGUCG | 1061 |
| AGACUACAUUCUGUUCAUA | 1062 | UAUGAACAGAAUGUAGUCU | 1063 |
| GACUACAUUCUGUUCAUAG | 1064 | CUAUGAACAGAAUGUAGUC | 1065 |
| ACUACAUUCUGUUCAUAGA | 1066 | UCUAUGAACAGAAUGUAGU | 1067 |
| CUACAUUCUGUUCAUAGAU | 1068 | AUCUAUGAACAGAAUGUAG | 1069 |
| UACAUUCUGUUCAUAGAUG | 1070 | CAUCUAUGAACAGAAUGUA | 1071 |
| CAUUCUGUUCAUAGAUGUU | 1072 | AACAUCUAUGAACAGAAUG | 1073 |
| AUUCUGUUCAUAGAUGUUG | 1074 | CAACAUCUAUGAACAGAAU | 1075 |
| CAAUUUCCUGACUAAUCCA | 1076 | UGGAUUAGUCAGGAAAUUG | 1077 |
| AAUUUCCUGACUAAUCCAC | 1078 | GUGGAUUAGUCAGGAAAUU | 1079 |
| AUUUCCUGACUAAUCCACA | 1080 | UGUGGAUUAGUCAGGAAAU | 1081 |
| CCUGACUAAUCCACAGACC | 1082 | GGUCUGUGGAUUAGUCAGG | 1083 |
| ACUAAUCCACAGACCCUCA | 1084 | UGAGGGUCUGUGGAUUAGU | 1085 |
| CUAAUCCACAGACCCUCAA | 1086 | UUGAGGGUCUGUGGAUUAG | 1087 |
| UAAUCCACAGACCCUCAAU | 1088 | AUUGAGGGUCUGUGGAUUA | 1089 |
| AAUCCACAGACCCUCAAUC | 1090 | GAUUGAGGGUCUGUGGAUU | 1091 |
| AUCCACAGACCCUCAAUCU | 1092 | AGAUUGAGGGUCUGUGGAU | 1093 |
| UCCACAGACCCUCAAUCUA | 1094 | UAGAUUGAGGGUCUGUGGA | 1095 |
| GGGCCUGUAUUCUAAUUUC | 1096 | GAAAUUAGAAUACAGGCCC | 1097 |
| GGCCUGUAUUCUAAUUUCU | 1098 | AGAAAUUAGAAUACAGGCC | 1099 |
| GCCUGUAUUCUAAUUUCUG | 1100 | CAGAAAUUAGAAUACAGGC | 1101 |
| CCUGUAUUCUAAUUUCUGG | 1102 | CCAGAAAUUAGAAUACAGG | 1103 |
| CUGUAUUCUAAUUUCUGGU | 1104 | ACCAGAAAUUAGAAUACAG | 1105 |
| UGUAUUCUAAUUUCUGGUG | 1106 | CACCAGAAAUUAGAAUACA | 1107 |
| UUCUAAUUUCUGGUGCGGA | 1108 | UCCGCACCAGAAAUUAGAA | 1109 |
| UCUAAUUUCUGGUGCGGAA | 1110 | UUCCGCACCAGAAAUUAGA | 1111 |
| CUAAUUUCUGGUGCGGAAU | 1112 | AUUCCGCACCAGAAAUUAG | 1113 |
| UAAUUUCUGGUGCGGAAUC | 1114 | GAUUCCGCACCAGAAAUUA | 1115 |
| AAUUUCUGGUGCGGAAUCA | 1116 | UGAUUCCGCACCAGAAAUU | 1117 |
| AUUUCUGGUGCGGAAUCAC | 1118 | GUGAUUCCGCACCAGAAAU | 1119 |
| CCCAGACUACGUUCAGAUU | 1120 | AAUCUGAACGUAGUCUGGG | 1121 |
| CCAGACUACGUUCAGAUUC | 1122 | GAAUCUGAACGUAGUCUGG | 1123 |
| CAGACUACGUUCAGAUUCG | 1124 | CGAAUCUGAACGUAGUCUG | 1125 |
| AGACUACGUUCAGAUUCGA | 1126 | UCGAAUCUGAACGUAGUCU | 1127 |
| GACUACGUUCAGAUUCGAG | 1128 | CUCGAAUCUGAACGUAGUC | 1129 |
| GAAUGGAAGAGGACAGGCU | 1130 | AGCCUGUCCUCUUCCAUUC | 1131 |
| AAUGGAAGAGGACAGGCUG | 1132 | CAGCCUGUCCUCUUCCAUU | 1133 |
| AAGAGGACAGGCUGCUUCC | 1134 | GGAAGCAGCCUGUCCUCUU | 1135 |
| GUCCACUCCACCUUCCUAA | 1136 | UUAGGAAGGUGGAGUGGAC | 1137 |
| UCCACUCCACCUUCCUAAU | 1138 | AUUAGGAAGGUGGAGUGGA | 1139 |
| CCACUCCACCUUCCUAAUU | 1140 | AAUUAGGAAGGUGGAGUGG | 1141 |
| CACUCCACCUUCCUAAUUG | 1142 | CAAUUAGGAAGGUGGAGUG | 1143 |
| ACUCCACCUUCCUAAUUGA | 1144 | UCAAUUAGGAAGGUGGAGU | 1145 |
| CUCCACCUUCCUAAUUGAC | 1146 | GUCAAUUAGGAAGGUGGAG | 1147 |
| UCCACCUUCCUAAUUGACC | 1148 | GGUCAAUUAGGAAGGUGGA | 1149 |
| CCUUCCUAAUUGACCUCAG | 1150 | CUGAGGUCAAUUAGGAAGG | 1151 |
| CUUCCUAAUUGACCUCAGG | 1152 | CCUGAGGUCAAUUAGGAAG | 1153 |
| CUAAUUGACCUCAGGAAGG | 1154 | CCUUCCUGAGGUCAAUUAG | 1155 |
| AAUUGACCUCAGGAAGGAG | 1156 | CUCCUUCCUGAGGUCAAUU | 1157 |
| UCAGGAAGGAGGCCUCGGA | 1158 | UCCGAGGCCUCCUUCCUGA | 1159 |
| AGGAAGGAGGCCUCGGACA | 1160 | UGUCCGAGGCCUCCUUCCU | 1161 |
| CCCACACCAGGACUACACC | 1162 | GGUGUAGUCCUGGUGUGGG | 1163 |
| CCACACCAGGACUACACCU | 1164 | AGGUGUAGUCCUGGUGUGG | 1165 |
| AGGACUACACCUGGACCUU | 1166 | AAGGUCCAGGUGUAGUCCU | 1167 |
| GGACUACACCUGGACCUUU | 1168 | AAAGGUCCAGGUGUAGUCC | 1169 |
| ACUACACCUGGACCUUUGA | 1170 | UCAAAGGUCCAGGUGUAGU | 1171 |
| CUACACCUGGACCUUUGAU | 1172 | AUCAAAGGUCCAGGUGUAG | 1173 |
| UACACCUGGACCUUUGAUG | 1174 | CAUCAAAGGUCCAGGUGUA | 1175 |
| ACACCUGGACCUUUGAUGA | 1176 | UCAUCAAAGGUCCAGGUGU | 1177 |
| CACCUGGACCUUUGAUGAC | 1178 | GUCAUCAAAGGUCCAGGUG | 1179 |
| ACCUGGACCUUUGAUGACA | 1180 | UGUCAUCAAAGGUCCAGGU | 1181 |
| CCUGGACCUUUGAUGACAU | 1182 | AUGUCAUCAAAGGUCCAGG | 1183 |
| UCAUUGUCUUUGCCUUCUC | 1184 | GAGAAGGCAAAGACAAUGA | 1185 |
| CAUUGUCUUUGCCUUCUCC | 1186 | GGAGAAGGCAAAGACAAUG | 1187 |
| AUUGUCUUUGCCUUCUCCA | 1188 | UGGAGAAGGCAAAGACAAU | 1189 |
| UGUCUUUGCCUUCUCCAGC | 1190 | GCUGGAGAAGGCAAAGACA | 1191 |
| GUCUUUGCCUUCUCCAGCA | 1192 | UGCUGGAGAAGGCAAAGAC | 1193 |
| CUUCUCCAGCAGGCAAGCA | 1194 | UGCUUGCCUGCUGGAGAAG | 1195 |
| GCAGGCAAGCAGGCAUCCA | 1196 | UGGAUGCCUGCUUGCCUGC | 1197 |
| CAGGCAAGCAGGCAUCCAG | 1198 | CUGGAUGCCUGCUUGCCUG | 1199 |
| AGGCAAGCAGGCAUCCAGA | 1200 | UCUGGAUGCCUGCUUGCCU | 1201 |
| GGCAAGCAGGCAUCCAGAU | 1202 | AUCUGGAUGCCUGCUUGCC | 1203 |
| GCAAGCAGGCAUCCAGAUG | 1204 | CAUCUGGAUGCCUGCUUGC | 1205 |
| CAAGCAGGCAUCCAGAUGU | 1206 | ACAUCUGGAUGCCUGCUUG | 1207 |
| AAGCAGGCAUCCAGAUGUA | 1208 | UACAUCUGGAUGCCUGCUU | 1209 |
| AGCAGGCAUCCAGAUGUAC | 1210 | GUACAUCUGGAUGCCUGCU | 1211 |
| GCAGGCAUCCAGAUGUACC | 1212 | GGUACAUCUGGAUGCCUGC | 1213 |
| CAGGCAUCCAGAUGUACCU | 1214 | AGGUACAUCUGGAUGCCUG | 1215 |
| AGCACUAUGGCUACCUGCC | 1216 | GGCAGGUAGCCAUAGUGCU | 1217 |
| GCACUAUGGCUACCUGCCC | 1218 | GGGCAGGUAGCCAUAGUGC | 1219 |
| CACUAUGGCUACCUGCCCA | 1220 | UGGGCAGGUAGCCAUAGUG | 1221 |
| CAUCAGACACUGCAGGAAG | 1222 | CUUCCUGCAGUGUCUGAUG | 1223 |
| AUCAGACACUGCAGGAAGA | 1224 | UCUUCCUGCAGUGUCUGAU | 1225 |
| UCAGACACUGCAGGAAGAC | 1226 | GUCUUCCUGCAGUGUCUGA | 1227 |
| ACUGCAGGAAGACAUCGAG | 1228 | CUCGAUGUCUUCCUGCAGU | 1229 |
| CCUCAUCCAUGUGCAGAUU | 1230 | AAUCUGCACAUGGAUGAGG | 1231 |
| UCAUCCAUGUGCAGAUUGA | 1232 | UCAAUCUGCACAUGGAUGA | 1233 |
| AUCCAUGUGCAGAUUGAAG | 1234 | CUUCAAUCUGCACAUGGAU | 1235 |
| UCCAUGUGCAGAUUGAAGC | 1236 | GCUUCAAUCUGCACAUGGA | 1237 |
| CCAUGUGCAGAUUGAAGCA | 1238 | UGCUUCAAUCUGCACAUGG | 1239 |
| CAUGUGCAGAUUGAAGCAA | 1240 | UUGCUUCAAUCUGCACAUG | 1241 |
| UUGAAGCAAUGAUUGACCG | 1242 | CGGUCAAUCAUUGCUUCAA | 1243 |
| UGAAGCAAUGAUUGACCGU | 1244 | ACGGUCAAUCAUUGCUUCA | 1245 |
| GAAGCAAUGAUUGACCGUC | 1246 | GACGGUCAAUCAUUGCUUC | 1247 |
| UUGACCGUCCUCCAAUGGA | 1248 | UCCAUUGGAGGACGGUCAA | 1249 |
| UGACCGUCCUCCAAUGGAA | 1250 | UUCCAUUGGAGGACGGUCA | 1251 |
| AACCCUCCCAGUAUGUCUC | 1252 | GAGACAUACUGGGAGGGUU | 1253 |
| CCCUCCCAGUAUGUCUCAG | 1254 | CUGAGACAUACUGGGAGGG | 1255 |
| CCUCCCAGUAUGUCUCAGU | 1256 | ACUGAGACAUACUGGGAGG | 1257 |
| CUCCCAGUAUGUCUCAGUU | 1258 | AACUGAGACAUACUGGGAG | 1259 |
| UCCCAGUAUGUCUCAGUUG | 1260 | CAACUGAGACAUACUGGGA | 1261 |
| CCAGUAUGUCUCAGUUGUC | 1262 | GACAACUGAGACAUACUGG | 1263 |
| CAGUAUGUCUCAGUUGUCC | 1264 | GGACAACUGAGACAUACUG | 1265 |
| AGUAUGUCUCAGUUGUCCC | 1266 | GGGACAACUGAGACAUACU | 1267 |
| GUAUGUCUCAGUUGUCCCU | 1268 | AGGGACAACUGAGACAUAC | 1269 |
| UAUGUCUCAGUUGUCCCUA | 1270 | UAGGGACAACUGAGACAUA | 1271 |
| AUGUCUCAGUUGUCCCUAA | 1272 | UUAGGGACAACUGAGACAU | 1273 |
| UGUCUCAGUUGUCCCUAAA | 1274 | UUUAGGGACAACUGAGACA | 1275 |
| GUCUCAGUUGUCCCUAAAU | 1276 | AUUUAGGGACAACUGAGAC | 1277 |
| UCUCAGUUGUCCCUAAAUA | 1278 | UAUUUAGGGACAACUGAGA | 1279 |
| CUCAGUUGUCCCUAAAUAU | 1280 | AUAUUUAGGGACAACUGAG | 1281 |
| UCAGUUGUCCCUAAAUAUC | 1282 | GAUAUUUAGGGACAACUGA | 1283 |
| CAGUUGUCCCUAAAUAUCC | 1284 | GGAUAUUUAGGGACAACUG | 1285 |
| UGUCCCUAAAUAUCCAGAC | 1286 | GUCUGGAUAUUUAGGGACA | 1287 |
| CAAGAUGGGAUUUGAUGAG | 1288 | CUCAUCAAAUCCCAUCUUG | 1289 |
| AGAUUGAGGUCAAGAUUGU | 1290 | ACAAUCUUGACCUCAAUCU | 1291 |
| GAUUGAGGUCAAGAUUGUC | 1292 | GACAAUCUUGACCUCAAUC | 1293 |
| AUUGAGGUCAAGAUUGUCG | 1294 | CGACAAUCUUGACCUCAAU | 1295 |
| UUGAGGUCAAGAUUGUCGA | 1296 | UCGACAAUCUUGACCUCAA | 1297 |
| UGAGGUCAAGAUUGUCGAG | 1298 | CUCGACAAUCUUGACCUCA | 1299 |
| GAGGUCAAGAUUGUCGAGG | 1300 | CCUCGACAAUCUUGACCUC | 1301 |
| AGGUCAAGAUUGUCGAGGC | 1302 | GCCUCGACAAUCUUGACCU | 1303 |
| GGUCAAGAUUGUCGAGGCU | 1304 | AGCCUCGACAAUCUUGACC | 1305 |
| GUCAAGAUUGUCGAGGCUG | 1306 | CAGCCUCGACAAUCUUGAC | 1307 |
| UCAAGAUUGUCGAGGCUGU | 1308 | ACAGCCUCGACAAUCUUGA | 1309 |
| CAAGAUUGUCGAGGCUGUG | 1310 | CACAGCCUCGACAAUCUUG | 1311 |
| AAGAUUGUCGAGGCUGUGG | 1312 | CCACAGCCUCGACAAUCUU | 1313 |
| AGAUUGUCGAGGCUGUGGA | 1314 | UCCACAGCCUCGACAAUCU | 1315 |
| GAUUGUCGAGGCUGUGGAU | 1316 | AUCCACAGCCUCGACAAUC | 1317 |
| AUUGUCGAGGCUGUGGAUG | 1318 | CAUCCACAGCCUCGACAAU | 1319 |
| UUGUCGAGGCUGUGGAUGG | 1320 | CCAUCCACAGCCUCGACAA | 1321 |
| UGUCGAGGCUGUGGAUGGA | 1322 | UCCAUCCACAGCCUCGACA | 1323 |
| GCUGAAGGCACUGAAUAUU | 1324 | AAUAUUCAGUGCCUUCAGC | 1325 |
| AAAUGCUGCCUGGCUAUCG | 1326 | CGAUAGCCAGGCAGCAUUU | 1327 |
| AAUGCUGCCUGGCUAUCGA | 1328 | UCGAUAGCCAGGCAGCAUU | 1329 |
| AUGCUGCCUGGCUAUCGAG | 1330 | CUCGAUAGCCAGGCAGCAU | 1331 |
| GAUCCCUAUUCCUCCAGGC | 1332 | GCCUGGAGGAAUAGGGAUC | 1333 |
| AUCCCUAUUCCUCCAGGCC | 1334 | GGCCUGGAGGAAUAGGGAU | 1335 |
| CCCUAUUCCUCCAGGCCUC | 1336 | GAGGCCUGGAGGAAUAGGG | 1337 |
| CCUAUUCCUCCAGGCCUCU | 1338 | AGAGGCCUGGAGGAAUAGG | 1339 |
| CUUUCUCAGCCACUACUCA | 1340 | UGAGUAGUGGCUGAGAAAG | 1341 |
| AAAGAGGUAAUUGAUCGAG | 1342 | CUCGAUCAAUUACCUCUUU | 1343 |
| AGAAGACUCUUGUAAUUGA | 1344 | UCAAUUACAAGAGUCUUCU | 1345 |
| GAAGACUCUUGUAAUUGAA | 1346 | UUCAAUUACAAGAGUCUUC | 1347 |
| AAGACUCUUGUAAUUGAAG | 1348 | CUUCAAUUACAAGAGUCUU | 1349 |
| CUUGUAAUUGAAGACGAUG | 1350 | CAUCGUCUUCAAUUACAAG | 1351 |
| UUGUAAUUGAAGACGAUGU | 1352 | ACAUCGUCUUCAAUUACAA | 1353 |
| UGUAAUUGAAGACGAUGUG | 1354 | CACAUCGUCUUCAAUUACA | 1355 |
| GUAAUUGAAGACGAUGUGC | 1356 | GCACAUCGUCUUCAAUUAC | 1357 |
| UAAUUGAAGACGAUGUGCG | 1358 | CGCACAUCGUCUUCAAUUA | 1359 |
| AAUUGAAGACGAUGUGCGU | 1360 | ACGCACAUCGUCUUCAAUU | 1361 |
| AUUGAAGACGAUGUGCGUU | 1362 | AACGCACAUCGUCUUCAAU | 1363 |
| UUGAAGACGAUGUGCGUUU | 1364 | AAACGCACAUCGUCUUCAA | 1365 |
| UGAAGACGAUGUGCGUUUU | 1366 | AAAACGCACAUCGUCUUCA | 1367 |
| GAAGACGAUGUGCGUUUUG | 1368 | CAAAACGCACAUCGUCUUC | 1369 |
| AAGACGAUGUGCGUUUUGA | 1370 | UCAAAACGCACAUCGUCUU | 1371 |
| CGAUGUGCGUUUUGAGCAU | 1372 | AUGCUCAAAACGCACAUCG | 1373 |
| AUGUGCGUUUUGAGCAUCA | 1374 | UGAUGCUCAAAACGCACAU | 1375 |
| GCGUUUUGAGCAUCAGUUU | 1376 | AAACUGAUGCUCAAAACGC | 1377 |
| UUUUGAGCAUCAGUUUAAG | 1378 | CUUAAACUGAUGCUCAAAA | 1379 |
| UUUGAGCAUCAGUUUAAGA | 1380 | UCUUAAACUGAUGCUCAAA | 1381 |
| UUGAGCAUCAGUUUAAGAA | 1382 | UUCUUAAACUGAUGCUCAA | 1383 |
| UGAGCAUCAGUUUAAGAAG | 1384 | CUUCUUAAACUGAUGCUCA | 1385 |
| GAGCAUCAGUUUAAGAAGA | 1386 | UCUUCUUAAACUGAUGCUC | 1387 |
| AGCAUCAGUUUAAGAAGAA | 1388 | UUCUUCUUAAACUGAUGCU | 1389 |
| GCAUCAGUUUAAGAAGAAG | 1390 | CUUCUUCUUAAACUGAUGC | 1391 |
| CAGUUUAAGAAGAAGCUGA | 1392 | UCAGCUUCUUCUUAAACUG | 1393 |
| UUAAGAAGAAGCUGAUGAA | 1394 | UUCAUCAGCUUCUUCUUAA | 1395 |
| UAAGAAGAAGCUGAUGAAG | 1396 | CUUCAUCAGCUUCUUCUUA | 1397 |
| GCUGAUGAAGCUGAUGGAU | 1398 | AUCCAUCAGCUUCAUCAGC | 1399 |
| CUGAUGAAGCUGAUGGAUA | 1400 | UAUCCAUCAGCUUCAUCAG | 1401 |
| UGAUGAAGCUGAUGGAUAA | 1402 | UUAUCCAUCAGCUUCAUCA | 1403 |
| GAUGAAGCUGAUGGAUAAC | 1404 | GUUAUCCAUCAGCUUCAUC | 1405 |
| AGGCUCAGCUGGACUGGGA | 1406 | UCCCAGUCCAGCUGAGCCU | 1407 |
| GGCUCAGCUGGACUGGGAA | 1408 | UUCCCAGUCCAGCUGAGCC | 1409 |
| ACUGAUUUAUAUUGGUAGG | 1410 | CCUACCAAUAUAAAUCAGU | 1411 |
| UUUAUAUUGGUAGGAAGAG | 1412 | CUCUUCCUACCAAUAUAAA | 1413 |
| UUAUAUUGGUAGGAAGAGG | 1414 | CCUCUUCCUACCAAUAUAA | 1415 |
| UAUAUUGGUAGGAAGAGGA | 1416 | UCCUCUUCCUACCAAUAUA | 1417 |
| AUAUUGGUAGGAAGAGGAU | 1418 | AUCCUCUUCCUACCAAUAU | 1419 |
| UAUUGGUAGGAAGAGGAUG | 1420 | CAUCCUCUUCCUACCAAUA | 1421 |
| GGUAGGAAGAGGAUGCAAG | 1422 | CUUGCAUCCUCUUCCUACC | 1423 |
| GUAGGAAGAGGAUGCAAGU | 1424 | ACUUGCAUCCUCUUCCUAC | 1425 |
| GAAGAGGAUGCAAGUAAAG | 1426 | CUUUACUUGCAUCCUCUUC | 1427 |
| AAGAGGAUGCAAGUAAAGG | 1428 | CCUUUACUUGCAUCCUCUU | 1429 |
| AGAGGAUGCAAGUAAAGGA | 1430 | UCCUUUACUUGCAUCCUCU | 1431 |
| GAGGAUGCAAGUAAAGGAG | 1432 | CUCCUUUACUUGCAUCCUC | 1433 |
| AGGAUGCAAGUAAAGGAGC | 1434 | GCUCCUUUACUUGCAUCCU | 1435 |
| GGAUGCAAGUAAAGGAGCC | 1436 | GGCUCCUUUACUUGCAUCC | 1437 |
| GAUGCAAGUAAAGGAGCCA | 1438 | UGGCUCCUUUACUUGCAUC | 1439 |
| AAAGCAGUGCCCAAUGUGG | 1440 | CCACAUUGGGCACUGCUUU | 1441 |
| AAGCAGUGCCCAAUGUGGC | 1442 | GCCACAUUGGGCACUGCUU | 1443 |
| GAAGCCGACUAUUCCUACU | 1444 | AGUAGGAAUAGUCGGCUUC | 1445 |
| ACUAUUCCUACUGGACCCU | 1446 | AGGGUCCAGUAGGAAUAGU | 1447 |
| CUAUUCCUACUGGACCCUG | 1448 | CAGGGUCCAGUAGGAAUAG | 1449 |
| UCCUACUGGACCCUGGGCU | 1450 | AGCCCAGGGUCCAGUAGGA | 1451 |
| GUCAUCUCUCUGGAAGGAG | 1452 | CUCCUUCCAGAGAGAUGAC | 1453 |
| UCAUCUCUCUGGAAGGAGC | 1454 | GCUCCUUCCAGAGAGAUGA | 1455 |
| CAUCUCUCUGGAAGGAGCA | 1456 | UGCUCCUUCCAGAGAGAUG | 1457 |
| AUCUCUCUGGAAGGAGCAC | 1458 | GUGCUCCUUCCAGAGAGAU | 1459 |
| GAAGGAGCACAGAAGCUGG | 1460 | CCAGCUUCUGUGCUCCUUC | 1461 |
| AGGAGCACAGAAGCUGGUU | 1462 | AACCAGCUUCUGUGCUCCU | 1463 |
| GGAGCACAGAAGCUGGUUG | 1464 | CAACCAGCUUCUGUGCUCC | 1465 |
| GAGCACAGAAGCUGGUUGG | 1466 | CCAACCAGCUUCUGUGCUC | 1467 |
| AGCACAGAAGCUGGUUGGA | 1468 | UCCAACCAGCUUCUGUGCU | 1469 |
| GCACAGAAGCUGGUUGGAG | 1470 | CUCCAACCAGCUUCUGUGC | 1471 |
| CACAGAAGCUGGUUGGAGC | 1472 | GCUCCAACCAGCUUCUGUG | 1473 |
| CAGAAGCUGGUUGGAGCCA | 1474 | UGGCUCCAACCAGCUUCUG | 1475 |
| AGAAGCUGGUUGGAGCCAA | 1476 | UUGGCUCCAACCAGCUUCU | 1477 |
| AAGCUGGUUGGAGCCAAUC | 1478 | GAUUGGCUCCAACCAGCUU | 1479 |
| AGCUGGUUGGAGCCAAUCC | 1480 | GGAUUGGCUCCAACCAGCU | 1481 |
| CUGGUUGGAGCCAAUCCUU | 1482 | AAGGAUUGGCUCCAACCAG | 1483 |
| GGUUGGAGCCAAUCCUUUU | 1484 | AAAAGGAUUGGCUCCAACC | 1485 |
| GUUGGAGCCAAUCCUUUUG | 1486 | CAAAAGGAUUGGCUCCAAC | 1487 |
| UCCUUUUGGGAAGAUGCUG | 1488 | CAGCAUCUUCCCAAAAGGA | 1489 |
| UUUGGGAAGAUGCUGCCAG | 1490 | CUGGCAGCAUCUUCCCAAA | 1491 |
| GGAAGAUGCUGCCAGUGGA | 1492 | UCCACUGGCAGCAUCUUCC | 1493 |
| GAAGAUGCUGCCAGUGGAU | 1494 | AUCCACUGGCAGCAUCUUC | 1495 |
| AAGAUGCUGCCAGUGGAUG | 1496 | CAUCCACUGGCAGCAUCUU | 1497 |
| AGAUGCUGCCAGUGGAUGA | 1498 | UCAUCCACUGGCAGCAUCU | 1499 |
| GAUGCUGCCAGUGGAUGAG | 1500 | CUCAUCCACUGGCAGCAUC | 1501 |
| AUGCUGCCAGUGGAUGAGU | 1502 | ACUCAUCCACUGGCAGCAU | 1503 |
| UGCUGCCAGUGGAUGAGUU | 1504 | AACUCAUCCACUGGCAGCA | 1505 |
| GCUGCCAGUGGAUGAGUUU | 1506 | AAACUCAUCCACUGGCAGC | 1507 |
| CUGCCAGUGGAUGAGUUUC | 1508 | GAAACUCAUCCACUGGCAG | 1509 |
| UGCCAGUGGAUGAGUUUCU | 1510 | AGAAACUCAUCCACUGGCA | 1511 |
| GCCAGUGGAUGAGUUUCUG | 1512 | CAGAAACUCAUCCACUGGC | 1513 |
| CCAGUGGAUGAGUUUCUGC | 1514 | GCAGAAACUCAUCCACUGG | 1515 |
| CAGUGGAUGAGUUUCUGCC | 1516 | GGCAGAAACUCAUCCACUG | 1517 |
| AGUGGAUGAGUUUCUGCCA | 1518 | UGGCAGAAACUCAUCCACU | 1519 |
| GUGGAUGAGUUUCUGCCAG | 1520 | CUGGCAGAAACUCAUCCAC | 1521 |
| UGAGUUUCUGCCAGUCAUG | 1522 | CAUGACUGGCAGAAACUCA | 1523 |
| GAGUUUCUGCCAGUCAUGU | 1524 | ACAUGACUGGCAGAAACUC | 1525 |
| AGUUUCUGCCAGUCAUGUA | 1526 | UACAUGACUGGCAGAAACU | 1527 |
| GUUUCUGCCAGUCAUGUAC | 1528 | GUACAUGACUGGCAGAAAC | 1529 |
| AAGGAGUAUUAUGAAUCCA | 1530 | UGGAUUCAUAAUACUCCUU | 1531 |
| AGGAGUAUUAUGAAUCCAG | 1532 | CUGGAUUCAUAAUACUCCU | 1533 |
| GGAGUAUUAUGAAUCCAGG | 1534 | CCUGGAUUCAUAAUACUCC | 1535 |
| GAGUAUUAUGAAUCCAGGG | 1536 | CCCUGGAUUCAUAAUACUC | 1537 |
| AGUAUUAUGAAUCCAGGGA | 1538 | UCCCUGGAUUCAUAAUACU | 1539 |
| GUAUUAUGAAUCCAGGGAC | 1540 | GUCCCUGGAUUCAUAAUAC | 1541 |
| UAUUAUGAAUCCAGGGACC | 1542 | GGUCCCUGGAUUCAUAAUA | 1543 |
| AUUAUGAAUCCAGGGACCU | 1544 | AGGUCCCUGGAUUCAUAAU | 1545 |
| UUAUGAAUCCAGGGACCUG | 1546 | CAGGUCCCUGGAUUCAUAA | 1547 |
| UAUGAAUCCAGGGACCUGA | 1548 | UCAGGUCCCUGGAUUCAUA | 1549 |
| AUGAAUCCAGGGACCUGAA | 1550 | UUCAGGUCCCUGGAUUCAU | 1551 |
| CCCUUGCUCAUCUACCCUA | 1552 | UAGGGUAGAUGAGCAAGGG | 1553 |
| CCUUGCUCAUCUACCCUAC | 1554 | GUAGGGUAGAUGAGCAAGG | 1555 |
| CUUGCUCAUCUACCCUACG | 1556 | CGUAGGGUAGAUGAGCAAG | 1557 |
| UUGCUCAUCUACCCUACGC | 1558 | GCGUAGGGUAGAUGAGCAA | 1559 |
| UGCUCAUCUACCCUACGCA | 1560 | UGCGUAGGGUAGAUGAGCA | 1561 |
| GCUCAUCUACCCUACGCAC | 1562 | GUGCGUAGGGUAGAUGAGC | 1563 |
| CUCAUCUACCCUACGCACU | 1564 | AGUGCGUAGGGUAGAUGAG | 1565 |
| UCAUCUACCCUACGCACUA | 1566 | UAGUGCGUAGGGUAGAUGA | 1567 |
| GUACCUGAGUGACACGGAG | 1568 | CUCCGUGUCACUCAGGUAC | 1569 |
| GACCUCCACCAUCUGGGAC | 1570 | GUCCCAGAUGGUGGAGGUC | 1571 |
| ACCUCCACCAUCUGGGACA | 1572 | UGUCCCAGAUGGUGGAGGU | 1573 |
| AGUGGCCACCGACUGGGAU | 1574 | AUCCCAGUCGGUGGCCACU | 1575 |
| GUGGCCACCGACUGGGAUA | 1576 | UAUCCCAGUCGGUGGCCAC | 1577 |
| UGGCCACCGACUGGGAUAG | 1578 | CUAUCCCAGUCGGUGGCCA | 1579 |
| ACCGACUGGGAUAGGACAC | 1580 | GUGUCCUAUCCCAGUCGGU | 1581 |
| CACAUGCCUGGAAGUCCCG | 1582 | CGGGACUUCCAGGCAUGUG | 1583 |
| ACAUGCCUGGAAGUCCCGG | 1584 | CCGGGACUUCCAGGCAUGU | 1585 |
| CAUGCCUGGAAGUCCCGGA | 1586 | UCCGGGACUUCCAGGCAUG | 1587 |
| AUGCCUGGAAGUCCCGGAA | 1588 | UUCCGGGACUUCCAGGCAU | 1589 |
| UGCCUGGAAGUCCCGGAAG | 1590 | CUUCCGGGACUUCCAGGCA | 1591 |
| CCUGGAAGUCCCGGAAGCA | 1592 | UGCUUCCGGGACUUCCAGG | 1593 |
| UGGAAGUCCCGGAAGCAAA | 1594 | UUUGCUUCCGGGACUUCCA | 1595 |
| GGAAGUCCCGGAAGCAAAG | 1596 | CUUUGCUUCCGGGACUUCC | 1597 |
| GAAGUCCCGGAAGCAAAGC | 1598 | GCUUUGCUUCCGGGACUUC | 1599 |
| AAGUCCCGGAAGCAAAGCC | 1600 | GGCUUUGCUUCCGGGACUU | 1601 |
| AGUCCCGGAAGCAAAGCCG | 1602 | CGGCUUUGCUUCCGGGACU | 1603 |
| UCCCGGAAGCAAAGCCGCA | 1604 | UGCGGCUUUGCUUCCGGGA | 1605 |
| CCCGGAAGCAAAGCCGCAU | 1606 | AUGCGGCUUUGCUUCCGGG | 1607 |
| CCGGAAGCAAAGCCGCAUC | 1608 | GAUGCGGCUUUGCUUCCGG | 1609 |
| CGGAAGCAAAGCCGCAUCU | 1610 | AGAUGCGGCUUUGCUUCCG | 1611 |
| GGAAGCAAAGCCGCAUCUA | 1612 | UAGAUGCGGCUUUGCUUCC | 1613 |
| CAAAGCCGCAUCUACAGCA | 1614 | UGCUGUAGAUGCGGCUUUG | 1615 |
| AAAGCCGCAUCUACAGCAA | 1616 | UUGCUGUAGAUGCGGCUUU | 1617 |
| AAGCCGCAUCUACAGCAAU | 1618 | AUUGCUGUAGAUGCGGCUU | 1619 |
| AGCCGCAUCUACAGCAAUG | 1620 | CAUUGCUGUAGAUGCGGCU | 1621 |
| UCUACAGCAAUGCCAAGAA | 1622 | UUCUUGGCAUUGCUGUAGA | 1623 |
| GCCAACCUCCCUGGACACU | 1624 | AGUGUCCAGGGAGGUUGGC | 1625 |
| CUCCCUGGACACUGUGCCU | 1626 | AGGCACAGUGUCCAGGGAG | 1627 |
| UGGACACUGUGCCUUCAAG | 1628 | CUUGAAGGCACAGUGUCCA | 1629 |
| GGACACUGUGCCUUCAAGG | 1630 | CCUUGAAGGCACAGUGUCC | 1631 |
| GACACUGUGCCUUCAAGGG | 1632 | CCCUUGAAGGCACAGUGUC | 1633 |
| UGUGCCUUCAAGGGAUGAG | 1634 | CUCAUCCCUUGAAGGCACA | 1635 |
| CCUUCAAGGGAUGAGCUAU | 1636 | AUAGCUCAUCCCUUGAAGG | 1637 |
| CUUCAAGGGAUGAGCUAUG | 1638 | CAUAGCUCAUCCCUUGAAG | 1639 |
| UUUUCUAAAGGGCUAUUCA | 1640 | UGAAUAGCCCUUUAGAAAA | 1641 |
| UUUCUAAAGGGCUAUUCAU | 1642 | AUGAAUAGCCCUUUAGAAA | 1643 |
| UUCUAAAGGGCUAUUCAUC | 1644 | GAUGAAUAGCCCUUUAGAA | 1645 |
| UCUAAAGGGCUAUUCAUCU | 1646 | AGAUGAAUAGCCCUUUAGA | 1647 |
| CUAAAGGGCUAUUCAUCUG | 1648 | CAGAUGAAUAGCCCUUUAG | 1649 |
| UAAAGGGCUAUUCAUCUGU | 1650 | ACAGAUGAAUAGCCCUUUA | 1651 |
| AAAGGGCUAUUCAUCUGUU | 1652 | AACAGAUGAAUAGCCCUUU | 1653 |
| AAGGGCUAUUCAUCUGUUU | 1654 | AAACAGAUGAAUAGCCCUU | 1655 |
| GGGCUAUUCAUCUGUUUGC | 1656 | GCAAACAGAUGAAUAGCCC | 1657 |
| GGCUAUUCAUCUGUUUGCU | 1658 | AGCAAACAGAUGAAUAGCC | 1659 |
| GCUAUUCAUCUGUUUGCUC | 1660 | GAGCAAACAGAUGAAUAGC | 1661 |
| UAUUCAUCUGUUUGCUCCA | 1662 | UGGAGCAAACAGAUGAAUA | 1663 |
| AUUCAUCUGUUUGCUCCAG | 1664 | CUGGAGCAAACAGAUGAAU | 1665 |
| UUCAUCUGUUUGCUCCAGU | 1666 | ACUGGAGCAAACAGAUGAA | 1667 |
| UCAUCUGUUUGCUCCAGUU | 1668 | AACUGGAGCAAACAGAUGA | 1669 |
| CAUCUGUUUGCUCCAGUUU | 1670 | AAACUGGAGCAAACAGAUG | 1671 |
| UGUUUGCUCCAGUUUUCUG | 1672 | CAGAAAACUGGAGCAAACA | 1673 |
| UGCUCCAGUUUUCUGUUUU | 1674 | AAAACAGAAAACUGGAGCA | 1675 |
| UUUGUUUUGUUCUUAGUGG | 1676 | CCACUAAGAACAAAACAAA | 1677 |
| UGUUUUGUUCUUAGUGGUC | 1678 | GACCACUAAGAACAAAACA | 1679 |
| GUUUUGUUCUUAGUGGUCA | 1680 | UGACCACUAAGAACAAAAC | 1681 |
| UUUUGUUCUUAGUGGUCAC | 1682 | GUGACCACUAAGAACAAAA | 1683 |
| UUUGUUCUUAGUGGUCACA | 1684 | UGUGACCACUAAGAACAAA | 1685 |
| UUGUUCUUAGUGGUCACAG | 1686 | CUGUGACCACUAAGAACAA | 1687 |
| UGUUCUUAGUGGUCACAGU | 1688 | ACUGUGACCACUAAGAACA | 1689 |
| GUUCUUAGUGGUCACAGUC | 1690 | GACUGUGACCACUAAGAAC | 1691 |
| UUCUUAGUGGUCACAGUCA | 1692 | UGACUGUGACCACUAAGAA | 1693 |
| UCUUAGUGGUCACAGUCAU | 1694 | AUGACUGUGACCACUAAGA | 1695 |
| CUUAGUGGUCACAGUCAUC | 1696 | GAUGACUGUGACCACUAAG | 1697 |
| UUAGUGGUCACAGUCAUCU | 1698 | AGAUGACUGUGACCACUAA | 1699 |
| UAGUGGUCACAGUCAUCUA | 1700 | UAGAUGACUGUGACCACUA | 1701 |
| AGUGGUCACAGUCAUCUAA | 1702 | UUAGAUGACUGUGACCACU | 1703 |
| GUGGUCACAGUCAUCUAAC | 1704 | GUUAGAUGACUGUGACCAC | 1705 |
| UGGUCACAGUCAUCUAACC | 1706 | GGUUAGAUGACUGUGACCA | 1707 |
| GGUCACAGUCAUCUAACCA | 1708 | UGGUUAGAUGACUGUGACC | 1709 |
| GUCACAGUCAUCUAACCAA | 1710 | UUGGUUAGAUGACUGUGAC | 1711 |
| UCACAGUCAUCUAACCAAA | 1712 | UUUGGUUAGAUGACUGUGA | 1713 |
| UCUAACCAAAGUGAUCUAG | 1714 | CUAGAUCACUUUGGUUAGA | 1715 |
| CAAAGUGAUCUAGUGUGAU | 1716 | AUCACACUAGAUCACUUUG | 1717 |
| AAAGUGAUCUAGUGUGAUA | 1718 | UAUCACACUAGAUCACUUU | 1719 |
| AAGUGAUCUAGUGUGAUAG | 1720 | CUAUCACACUAGAUCACUU | 1721 |
| CAACCCAAAUUUCCCAAGA | 1722 | UCUUGGGAAAUUUGGGUUG | 1723 |
| AAAUUUCCCAAGACGGCUG | 1724 | CAGCCGUCUUGGGAAAUUU | 1725 |
| AAUUUCCCAAGACGGCUGA | 1726 | UCAGCCGUCUUGGGAAAUU | 1727 |
| AUUUCCCAAGACGGCUGAA | 1728 | UUCAGCCGUCUUGGGAAAU | 1729 |
| ACUGUAAUCCAGACACCUA | 1730 | UAGGUGUCUGGAUUACAGU | 1731 |
| CUGUAAUCCAGACACCUAA | 1732 | UUAGGUGUCUGGAUUACAG | 1733 |
| UGUAAUCCAGACACCUAAU | 1734 | AUUAGGUGUCUGGAUUACA | 1735 |
| GUAAUCCAGACACCUAAUU | 1736 | AAUUAGGUGUCUGGAUUAC | 1737 |
| UAAUCCAGACACCUAAUUC | 1738 | GAAUUAGGUGUCUGGAUUA | 1739 |
| AAUCCAGACACCUAAUUCU | 1740 | AGAAUUAGGUGUCUGGAUU | 1741 |
| AUCCAGACACCUAAUUCUU | 1742 | AAGAAUUAGGUGUCUGGAU | 1743 |
| UCCAGACACCUAAUUCUUC | 1744 | GAAGAAUUAGGUGUCUGGA | 1745 |
| ACACCUAAUUCUUCAGUUC | 1746 | GAACUGAAGAAUUAGGUGU | 1747 |
| CUAAUUCUUCAGUUCACUA | 1748 | UAGUGAACUGAAGAAUUAG | 1749 |
| UUCUUCAGUUCACUACUCA | 1750 | UGAGUAGUGAACUGAAGAA | 1751 |
| UCUUCAGUUCACUACUCAU | 1752 | AUGAGUAGUGAACUGAAGA | 1753 |
| CUUCAGUUCACUACUCAUG | 1754 | CAUGAGUAGUGAACUGAAG | 1755 |
| UUCAGUUCACUACUCAUGU | 1756 | ACAUGAGUAGUGAACUGAA | 1757 |
| UCAGUUCACUACUCAUGUG | 1758 | CACAUGAGUAGUGAACUGA | 1759 |
| CACUACUCAUGUGAUACUG | 1760 | CAGUAUCACAUGAGUAGUG | 1761 |
| ACUACUCAUGUGAUACUGA | 1762 | UCAGUAUCACAUGAGUAGU | 1763 |
| CUACUCAUGUGAUACUGAU | 1764 | AUCAGUAUCACAUGAGUAG | 1765 |
| UACUCAUGUGAUACUGAUU | 1766 | AAUCAGUAUCACAUGAGUA | 1767 |
| CAUGUGAUACUGAUUCCCA | 1768 | UGGGAAUCAGUAUCACAUG | 1769 |
| AUGUGAUACUGAUUCCCAC | 1770 | GUGGGAAUCAGUAUCACAU | 1771 |
| AUACUGAUUCCCACAUUAA | 1772 | UUAAUGUGGGAAUCAGUAU | 1773 |
| UACUGAUUCCCACAUUAAG | 1774 | CUUAAUGUGGGAAUCAGUA | 1775 |
| ACUGAUUCCCACAUUAAGG | 1776 | CCUUAAUGUGGGAAUCAGU | 1777 |
| CUGAUUCCCACAUUAAGGU | 1778 | ACCUUAAUGUGGGAAUCAG | 1779 |
| UGAUUCCCACAUUAAGGUU | 1780 | AACCUUAAUGUGGGAAUCA | 1781 |
| GAUUCCCACAUUAAGGUUG | 1782 | CAACCUUAAUGUGGGAAUC | 1783 |
| AUUCCCACAUUAAGGUUGA | 1784 | UCAACCUUAAUGUGGGAAU | 1785 |
| UUCCCACAUUAAGGUUGAA | 1786 | UUCAACCUUAAUGUGGGAA | 1787 |
| AAAGUGAUCACCGAGCUGU | 1788 | ACAGCUCGGUGAUCACUUU | 1789 |
| AAGUGAUCACCGAGCUGUC | 1790 | GACAGCUCGGUGAUCACUU | 1791 |
| AGUGAUCACCGAGCUGUCA | 1792 | UGACAGCUCGGUGAUCACU | 1793 |
| AUCACCGAGCUGUCACAUC | 1794 | GAUGUGACAGCUCGGUGAU | 1795 |
| UCACCGAGCUGUCACAUCA | 1796 | UGAUGUGACAGCUCGGUGA | 1797 |
| CUGUCACAUCAGCAAAUAU | 1798 | AUAUUUGCUGAUGUGACAG | 1799 |
| UGUCACAUCAGCAAAUAUG | 1800 | CAUAUUUGCUGAUGUGACA | 1801 |
| CAUCAGCAAAUAUGUAGUC | 1802 | GACUACAUAUUUGCUGAUG | 1803 |
| AGCAAAUAUGUAGUCAAGG | 1804 | CCUUGACUACAUAUUUGCU | 1805 |
| GCAAAUAUGUAGUCAAGGC | 1806 | GCCUUGACUACAUAUUUGC | 1807 |
| CAAAUAUGUAGUCAAGGCA | 1808 | UGCCUUGACUACAUAUUUG | 1809 |
| CAGGCCAACUAGACCACAC | 1810 | GUGUGGUCUAGUUGGCCUG | 1811 |
| AGGCCAACUAGACCACACU | 1812 | AGUGUGGUCUAGUUGGCCU | 1813 |
| GGCCAACUAGACCACACUU | 1814 | AAGUGUGGUCUAGUUGGCC | 1815 |
| GCCAACUAGACCACACUUA | 1816 | UAAGUGUGGUCUAGUUGGC | 1817 |
| CAACUAGACCACACUUAUU | 1818 | AAUAAGUGUGGUCUAGUUG | 1819 |
| AACUAGACCACACUUAUUG | 1820 | CAAUAAGUGUGGUCUAGUU | 1821 |
| ACUUAUUGGUCUAGUUUGU | 1822 | ACAAACUAGACCAAUAAGU | 1823 |
| CUUAUUGGUCUAGUUUGUC | 1824 | GACAAACUAGACCAAUAAG | 1825 |
| UUAUUGGUCUAGUUUGUCC | 1826 | GGACAAACUAGACCAAUAA | 1827 |
| UAUUGGUCUAGUUUGUCCG | 1828 | CGGACAAACUAGACCAAUA | 1829 |
| AUUGGUCUAGUUUGUCCGU | 1830 | ACGGACAAACUAGACCAAU | 1831 |
| GUCUAGUUUGUCCGUUUUA | 1832 | UAAAACGGACAAACUAGAC | 1833 |
| UCUAGUUUGUCCGUUUUAU | 1834 | AUAAAACGGACAAACUAGA | 1835 |
| UUUGUCCGUUUUAUAUGAC | 1836 | GUCAUAUAAAACGGACAAA | 1837 |
| GUCCGUUUUAUAUGACAUU | 1838 | AAUGUCAUAUAAAACGGAC | 1839 |
| UCCGUUUUAUAUGACAUUG | 1840 | CAAUGUCAUAUAAAACGGA | 1841 |
| CCGUUUUAUAUGACAUUGA | 1842 | UCAAUGUCAUAUAAAACGG | 1843 |
| CUUGUGUGUGCAACUUUUG | 1844 | CAAAAGUUGCACACACAAG | 1845 |
| UUGUGUGUGCAACUUUUGG | 1846 | CCAAAAGUUGCACACACAA | 1847 |
| UGUGUGUGCAACUUUUGGG | 1848 | CCCAAAAGUUGCACACACA | 1849 |
| GGACAGGAAUCACUUAAAA | 1850 | UUUUAAGUGAUUCCUGUCC | 1851 |
| GACAGGAAUCACUUAAAAU | 1852 | AUUUUAAGUGAUUCCUGUC | 1853 |
| ACAGGAAUCACUUAAAAUC | 1854 | GAUUUUAAGUGAUUCCUGU | 1855 |
| AAAAUCUUAGUCCCUGUUA | 1856 | UAACAGGGACUAAGAUUUU | 1857 |
| AAAUCUUAGUCCCUGUUAU | 1858 | AUAACAGGGACUAAGAUUU | 1859 |
| AAUCUUAGUCCCUGUUAUC | 1860 | GAUAACAGGGACUAAGAUU | 1861 |
| AUCUUAGUCCCUGUUAUCC | 1862 | GGAUAACAGGGACUAAGAU | 1863 |
| UAGUCCCUGUUAUCCAGUA | 1864 | UACUGGAUAACAGGGACUA | 1865 |
| AGUCCCUGUUAUCCAGUAG | 1866 | CUACUGGAUAACAGGGACU | 1867 |
| GUCCCUGUUAUCCAGUAGG | 1868 | CCUACUGGAUAACAGGGAC | 1869 |
| UGGCCUGUGACCAUCAUGG | 1870 | CCAUGAUGGUCACAGGCCA | 1871 |
| GGCCUGUGACCAUCAUGGC | 1872 | GCCAUGAUGGUCACAGGCC | 1873 |
| GCCUGUGACCAUCAUGGCA | 1874 | UGCCAUGAUGGUCACAGGC | 1875 |
| CCUGUGACCAUCAUGGCAG | 1876 | CUGCCAUGAUGGUCACAGG | 1877 |
| CUGUGACCAUCAUGGCAGU | 1878 | ACUGCCAUGAUGGUCACAG | 1879 |
| UGUGACCAUCAUGGCAGUU | 1880 | AACUGCCAUGAUGGUCACA | 1881 |
| GUGACCAUCAUGGCAGUUG | 1882 | CAACUGCCAUGAUGGUCAC | 1883 |
| UGACCAUCAUGGCAGUUGG | 1884 | CCAACUGCCAUGAUGGUCA | 1885 |
| GACCAUCAUGGCAGUUGGA | 1886 | UCCAACUGCCAUGAUGGUC | 1887 |
| ACCAUCAUGGCAGUUGGAG | 1888 | CUCCAACUGCCAUGAUGGU | 1889 |
| UCUCAUAUAGAGGUGACCA | 1890 | UGGUCACCUCUAUAUGAGA | 1891 |
| AUAUAGAGGUGACCAGUUU | 1892 | AAACUGGUCACCUCUAUAU | 1893 |
| UAUAGAGGUGACCAGUUUG | 1894 | CAAACUGGUCACCUCUAUA | 1895 |
| AUAGAGGUGACCAGUUUGC | 1896 | GCAAACUGGUCACCUCUAU | 1897 |
| UAGAGGUGACCAGUUUGCC | 1898 | GGCAAACUGGUCACCUCUA | 1899 |
| AGAGGUGACCAGUUUGCCA | 1900 | UGGCAAACUGGUCACCUCU | 1901 |
| GUGACCAGUUUGCCAUGUG | 1902 | CACAUGGCAAACUGGUCAC | 1903 |
| UGACCAGUUUGCCAUGUGG | 1904 | CCACAUGGCAAACUGGUCA | 1905 |
| GACCAGUUUGCCAUGUGGA | 1906 | UCCACAUGGCAAACUGGUC | 1907 |
| ACCAGUUUGCCAUGUGGAU | 1908 | AUCCACAUGGCAAACUGGU | 1909 |
| CCAGUUUGCCAUGUGGAUA | 1910 | UAUCCACAUGGCAAACUGG | 1911 |
| CAGUUUGCCAUGUGGAUAU | 1912 | AUAUCCACAUGGCAAACUG | 1913 |
| AGUUUGCCAUGUGGAUAUA | 1914 | UAUAUCCACAUGGCAAACU | 1915 |
| GUUUGCCAUGUGGAUAUAA | 1916 | UUAUAUCCACAUGGCAAAC | 1917 |
| UUUGCCAUGUGGAUAUAAU | 1918 | AUUAUAUCCACAUGGCAAA | 1919 |
| CCAUGUGGAUAUAAUUUAG | 1920 | CUAAAUUAUAUCCACAUGG | 1921 |
| GUAGAUAUUUGACAGUUUG | 1922 | CAAACUGUCAAAUAUCUAC | 1923 |
| AGAUAUUUGACAGUUUGUG | 1924 | CACAAACUGUCAAAUAUCU | 1925 |
| GAUAUUUGACAGUUUGUGU | 1926 | ACACAAACUGUCAAAUAUC | 1927 |
| UAUUUGACAGUUUGUGUAG | 1928 | CUACACAAACUGUCAAAUA | 1929 |
| AUUUGACAGUUUGUGUAGG | 1930 | CCUACACAAACUGUCAAAU | 1931 |
| UUUGACAGUUUGUGUAGGU | 1932 | ACCUACACAAACUGUCAAA | 1933 |
| UUGACAGUUUGUGUAGGUA | 1934 | UACCUACACAAACUGUCAA | 1935 |
| AGUUUGUGUAGGUAUUUGA | 1936 | UCAAAUACCUACACAAACU | 1937 |
| ACUCGAGUCAGGAUGCUCU | 1938 | AGAGCAUCCUGACUCGAGU | 1939 |
| CUCGAGUCAGGAUGCUCUA | 1940 | UAGAGCAUCCUGACUCGAG | 1941 |
| UCGAGUCAGGAUGCUCUAU | 1942 | AUAGAGCAUCCUGACUCGA | 1943 |
| CGAGUCAGGAUGCUCUAUU | 1944 | AAUAGAGCAUCCUGACUCG | 1945 |
| GAGUCAGGAUGCUCUAUUU | 1946 | AAAUAGAGCAUCCUGACUC | 1947 |
| GUCAGGAUGCUCUAUUUAU | 1948 | AUAAAUAGAGCAUCCUGAC | 1949 |
| GGAUGCUCUAUUUAUAAAG | 1950 | CUUUAUAAAUAGAGCAUCC | 1951 |
| UAAUAUAUAAAGGGUGAGG | 1952 | CCUCACCCUUUAUAUAUUA | 1953 |
| AAUAUAUAAAGGGUGAGGA | 1954 | UCCUCACCCUUUAUAUAUU | 1955 |
| AUAUAUAAAGGGUGAGGAC | 1956 | GUCCUCACCCUUUAUAUAU | 1957 |
| UAUAUAAAGGGUGAGGACU | 1958 | AGUCCUCACCCUUUAUAUA | 1959 |
| AAAGGGUGAGGACUGGCUG | 1960 | CAGCCAGUCCUCACCCUUU | 1961 |
| AGGGUGAGGACUGGCUGUG | 1962 | CACAGCCAGUCCUCACCCU | 1963 |
| GGUGAGGACUGGCUGUGCA | 1964 | UGCACAGCCAGUCCUCACC | 1965 |
| GACUGGCUGUGCAUCCUGC | 1966 | GCAGGAUGCACAGCCAGUC | 1967 |
| UGGCUGUGCAUCCUGCCCU | 1968 | AGGGCAGGAUGCACAGCCA | 1969 |
| GCUGUGCAUCCUGCCCUGU | 1970 | ACAGGGCAGGAUGCACAGC | 1971 |
| GGGUUUGCGCGCUGCUACA | 1972 | UGUAGCAGCGCGCAAACCC | 1973 |
| GGUUUGCGCGCUGCUACAG | 1974 | CUGUAGCAGCGCGCAAACC | 1975 |
| GUUUGCGCGCUGCUACAGA | 1976 | UCUGUAGCAGCGCGCAAAC | 1977 |
| UUUGCGCGCUGCUACAGAG | 1978 | CUCUGUAGCAGCGCGCAAA | 1979 |
| UUGCGCGCUGCUACAGAGC | 1980 | GCUCUGUAGCAGCGCGCAA | 1981 |
| UGCGCGCUGCUACAGAGCU | 1982 | AGCUCUGUAGCAGCGCGCA | 1983 |
| CUGCUACAGAGCUUCACGC | 1984 | GCGUGAAGCUCUGUAGCAG | 1985 |
| UGCUACAGAGCUUCACGCU | 1986 | AGCGUGAAGCUCUGUAGCA | 1987 |
| AGCUUCACGCUCUCCGCUC | 1988 | GAGCGGAGAGCGUGAAGCU | 1989 |
| CUUCACGCUCUCCGCUCCA | 1990 | UGGAGCGGAGAGCGUGAAG | 1991 |
| UUCACGCUCUCCGCUCCAC | 1992 | GUGGAGCGGAGAGCGUGAA | 1993 |
| AGACAGAGCACAUUUUCAG | 1994 | CUGAAAAUGUGCUCUGUCU | 1995 |
| GACAGAGCACAUUUUCAGG | 1996 | CCUGAAAAUGUGCUCUGUC | 1997 |
| AGCACAUUUUCAGGCCAGC | 1998 | GCUGGCCUGAAAAUGUGCU | 1999 |
| GCACAUUUUCAGGCCAGCA | 2000 | UGCUGGCCUGAAAAUGUGC | 2001 |
| CAUUUUCAGGCCAGCAACU | 2002 | AGUUGCUGGCCUGAAAAUG | 2003 |
| CAAAAUGGGCGAAGAUAUU | 2004 | AAUAUCUUCGCCCAUUUUG | 2005 |
| UUGUCUUUAGGAUAAGGCA | 2006 | UGCCUUAUCCUAAAGACAA | 2007 |
| ACAGAUGUUGCAGACUUCC | 2008 | GGAAGUCUGCAACAUCUGU | 2009 |
| CAGAUGUUGCAGACUUCCA | 2010 | UGGAAGUCUGCAACAUCUG | 2011 |
| AGAUGUUGCAGACUUCCAC | 2012 | GUGGAAGUCUGCAACAUCU | 2013 |
| UUGGUUCGGCAAUCUGAUU | 2014 | AAUCAGAUUGCCGAACCAA | 2015 |
| UUCGGCAAUCUGAUUCUCC | 2016 | GGAGAAUCAGAUUGCCGAA | 2017 |
| UCGGCAAUCUGAUUCUCCU | 2018 | AGGAGAAUCAGAUUGCCGA | 2019 |
| CGGCAAUCUGAUUCUCCUG | 2020 | CAGGAGAAUCAGAUUGCCG | 2021 |
| GGCAAUCUGAUUCUCCUGA | 2022 | UCAGGAGAAUCAGAUUGCC | 2023 |
| GCAAUCUGAUUCUCCUGAA | 2024 | UUCAGGAGAAUCAGAUUGC | 2025 |
| GAAUUUCCCAGCCAGGCUC | 2026 | GAGCCUGGCUGGGAAAUUC | 2027 |
| AAUUUCCCAGCCAGGCUCU | 2028 | AGAGCCUGGCUGGGAAAUU | 2029 |
| AUUUCCCAGCCAGGCUCUU | 2030 | AAGAGCCUGGCUGGGAAAU | 2031 |
| CAAAUGAUUCUCUAUCUCA | 2032 | UGAGAUAGAGAAUCAUUUG | 2033 |
| AAAUGAUUCUCUAUCUCAG | 2034 | CUGAGAUAGAGAAUCAUUU | 2035 |
| AAUGAUUCUCUAUCUCAGG | 2036 | CCUGAGAUAGAGAAUCAUU | 2037 |
| AUGAUUCUCUAUCUCAGGU | 2038 | ACCUGAGAUAGAGAAUCAU | 2039 |
| UGAUUCUCUAUCUCAGGUG | 2040 | CACCUGAGAUAGAGAAUCA | 2041 |
| GAUUCUCUAUCUCAGGUGA | 2042 | UCACCUGAGAUAGAGAAUC | 2043 |
| AUUCUCUAUCUCAGGUGAG | 2044 | CUCACCUGAGAUAGAGAAU | 2045 |
| AAGGGCUGGUCACCUGAUU | 2046 | AAUCAGGUGACCAGCCCUU | 2047 |
| GCUGGUCACCUGAUUUAGG | 2048 | CCUAAAUCAGGUGACCAGC | 2049 |
| CUGGUCACCUGAUUUAGGC | 2050 | GCCUAAAUCAGGUGACCAG | 2051 |
| UGGUCACCUGAUUUAGGCC | 2052 | GGCCUAAAUCAGGUGACCA | 2053 |
| GGUCACCUGAUUUAGGCCA | 2054 | UGGCCUAAAUCAGGUGACC | 2055 |
| GUCACCUGAUUUAGGCCAG | 2056 | CUGGCCUAAAUCAGGUGAC | 2057 |
| UCACCUGAUUUAGGCCAGC | 2058 | GCUGGCCUAAAUCAGGUGA | 2059 |
| CACCUGAUUUAGGCCAGCA | 2060 | UGCUGGCCUAAAUCAGGUG | 2061 |
| ACCUGAUUUAGGCCAGCAA | 2062 | UUGCUGGCCUAAAUCAGGU | 2063 |
| CCUGAUUUAGGCCAGCAAC | 2064 | GUUGCUGGCCUAAAUCAGG | 2065 |
| CUGAUUUAGGCCAGCAACC | 2066 | GGUUGCUGGCCUAAAUCAG | 2067 |
| UGAUUUAGGCCAGCAACCA | 2068 | UGGUUGCUGGCCUAAAUCA | 2069 |
| GAUUUAGGCCAGCAACCAG | 2070 | CUGGUUGCUGGCCUAAAUC | 2071 |
| AUUUAGGCCAGCAACCAGG | 2072 | CCUGGUUGCUGGCCUAAAU | 2073 |
| UUUAGGCCAGCAACCAGGG | 2074 | CCCUGGUUGCUGGCCUAAA | 2075 |
| UUAGGCCAGCAACCAGGGA | 2076 | UCCCUGGUUGCUGGCCUAA | 2077 |
| UAGGCCAGCAACCAGGGAA | 2078 | UUCCCUGGUUGCUGGCCUA | 2079 |
| AGGCCAGCAACCAGGGAAG | 2080 | CUUCCCUGGUUGCUGGCCU | 2081 |
| GCCAGCAACCAGGGAAGCU | 2082 | AGCUUCCCUGGUUGCUGGC | 2083 |
| GCAACCAGGGAAGCUCUUA | 2084 | UAAGAGCUUCCCUGGUUGC | 2085 |
| CAACCAGGGAAGCUCUUAG | 2086 | CUAAGAGCUUCCCUGGUUG | 2087 |
| AACCAGGGAAGCUCUUAGA | 2088 | UCUAAGAGCUUCCCUGGUU | 2089 |
| ACCAGGGAAGCUCUUAGAA | 2090 | UUCUAAGAGCUUCCCUGGU | 2091 |
| CCAGGGAAGCUCUUAGAAU | 2092 | AUUCUAAGAGCUUCCCUGG | 2093 |
| CAGGGAAGCUCUUAGAAUC | 2094 | GAUUCUAAGAGCUUCCCUG | 2095 |
| AGGGAAGCUCUUAGAAUCC | 2096 | GGAUUCUAAGAGCUUCCCU | 2097 |
| CCCUAAGAGUCCUUUCUGC | 2098 | GCAGAAAGGACUCUUAGGG | 2099 |
| CCUAAGAGUCCUUUCUGCU | 2100 | AGCAGAAAGGACUCUUAGG | 2101 |
| CUAAGAGUCCUUUCUGCUU | 2102 | AAGCAGAAAGGACUCUUAG | 2103 |
| UAAGAGUCCUUUCUGCUUU | 2104 | AAAGCAGAAAGGACUCUUA | 2105 |
| AAGAGUCCUUUCUGCUUUC | 2106 | GAAAGCAGAAAGGACUCUU | 2107 |
| AGAGUCCUUUCUGCUUUCU | 2108 | AGAAAGCAGAAAGGACUCU | 2109 |
| CUUUCUGCUUUCUUCACAG | 2110 | CUGUGAAGAAAGCAGAAAG | 2111 |
| CUGCUUUCUUCACAGAUUG | 2112 | CAAUCUGUGAAGAAAGCAG | 2113 |
| UGCUUUCUUCACAGAUUGA | 2114 | UCAAUCUGUGAAGAAAGCA | 2115 |
| GCUUUCUUCACAGAUUGAU | 2116 | AUCAAUCUGUGAAGAAAGC | 2117 |
| CUUUCUUCACAGAUUGAUU | 2118 | AAUCAAUCUGUGAAGAAAG | 2119 |
| UAUGUAAAAUGCAGAGUUG | 2120 | CAACUCUGCAUUUUACAUA | 2121 |
| UAAAAUGCAGAGUUGGACU | 2122 | AGUCCAACUCUGCAUUUUA | 2123 |
| AAAUGCAGAGUUGGACUAC | 2124 | GUAGUCCAACUCUGCAUUU | 2125 |
| AAUGCAGAGUUGGACUACA | 2126 | UGUAGUCCAACUCUGCAUU | 2127 |
| AUGCAGAGUUGGACUACAC | 2128 | GUGUAGUCCAACUCUGCAU | 2129 |
| GCAGAGUUGGACUACACGA | 2130 | UCGUGUAGUCCAACUCUGC | 2131 |
| CAGAGUUGGACUACACGAU | 2132 | AUCGUGUAGUCCAACUCUG | 2133 |
| AGAGUUGGACUACACGAUU | 2134 | AAUCGUGUAGUCCAACUCU | 2135 |
| GAGUUGGACUACACGAUUU | 2136 | AAAUCGUGUAGUCCAACUC | 2137 |
| AGUUGGACUACACGAUUUC | 2138 | GAAAUCGUGUAGUCCAACU | 2139 |
| GUUGGACUACACGAUUUCU | 2140 | AGAAAUCGUGUAGUCCAAC | 2141 |
| UUGGACUACACGAUUUCUU | 2142 | AAGAAAUCGUGUAGUCCAA | 2143 |
| UGGACUACACGAUUUCUUC | 2144 | GAAGAAAUCGUGUAGUCCA | 2145 |
| CUACACGAUUUCUUCCCAC | 2146 | GUGGGAAGAAAUCGUGUAG | 2147 |
| UACACGAUUUCUUCCCACU | 2148 | AGUGGGAAGAAAUCGUGUA | 2149 |
| ACACGAUUUCUUCCCACUC | 2150 | GAGUGGGAAGAAAUCGUGU | 2151 |
| CAAUCUGUCAUCCUAGUAU | 2152 | AUACUAGGAUGACAGAUUG | 2153 |
| AAUCUGUCAUCCUAGUAUA | 2154 | UAUACUAGGAUGACAGAUU | 2155 |
| AUCUGUCAUCCUAGUAUAG | 2156 | CUAUACUAGGAUGACAGAU | 2157 |
| UCUGUCAUCCUAGUAUAGA | 2158 | UCUAUACUAGGAUGACAGA | 2159 |
| CUGUCAUCCUAGUAUAGAU | 2160 | AUCUAUACUAGGAUGACAG | 2161 |
| UGUCAUCCUAGUAUAGAUC | 2162 | GAUCUAUACUAGGAUGACA | 2163 |
| GUCAUCCUAGUAUAGAUCA | 2164 | UGAUCUAUACUAGGAUGAC | 2165 |
| UCAUCCUAGUAUAGAUCAU | 2166 | AUGAUCUAUACUAGGAUGA | 2167 |
| CAUCCUAGUAUAGAUCAUG | 2168 | CAUGAUCUAUACUAGGAUG | 2169 |
| AUCCUAGUAUAGAUCAUGG | 2170 | CCAUGAUCUAUACUAGGAU | 2171 |
| UCCUAGUAUAGAUCAUGGU | 2172 | ACCAUGAUCUAUACUAGGA | 2173 |
| CCUAGUAUAGAUCAUGGUG | 2174 | CACCAUGAUCUAUACUAGG | 2175 |
| CUAGUAUAGAUCAUGGUGG | 2176 | CCACCAUGAUCUAUACUAG | 2177 |
| UAGUAUAGAUCAUGGUGGU | 2178 | ACCACCAUGAUCUAUACUA | 2179 |
| AGUAUAGAUCAUGGUGGUU | 2180 | AACCACCAUGAUCUAUACU | 2181 |
| UAUAGAUCAUGGUGGUUUC | 2182 | GAAACCACCAUGAUCUAUA | 2183 |
| AUAGAUCAUGGUGGUUUCC | 2184 | GGAAACCACCAUGAUCUAU | 2185 |
| AUCAUGGUGGUUUCCCUCA | 2186 | UGAGGGAAACCACCAUGAU | 2187 |
| UCAUGGUGGUUUCCCUCAA | 2188 | UUGAGGGAAACCACCAUGA | 2189 |
| CAUGGUGGUUUCCCUCAAG | 2190 | CUUGAGGGAAACCACCAUG | 2191 |
| GGUGGUUUCCCUCAAGUUU | 2192 | AAACUUGAGGGAAACCACC | 2193 |
| GUGGUUUCCCUCAAGUUUA | 2194 | UAAACUUGAGGGAAACCAC | 2195 |
| UGGUUUCCCUCAAGUUUAU | 2196 | AUAAACUUGAGGGAAACCA | 2197 |
| GGUUUCCCUCAAGUUUAUG | 2198 | CAUAAACUUGAGGGAAACC | 2199 |
| GUUUCCCUCAAGUUUAUGU | 2200 | ACAUAAACUUGAGGGAAAC | 2201 |
| UCCCUCAAGUUUAUGUUCU | 2202 | AGAACAUAAACUUGAGGGA | 2203 |
| UCAAGUUUAUGUUCUCAUG | 2204 | CAUGAGAACAUAAACUUGA | 2205 |
| CAAGUUUAUGUUCUCAUGC | 2206 | GCAUGAGAACAUAAACUUG | 2207 |
| AGUUUAUGUUCUCAUGCCC | 2208 | GGGCAUGAGAACAUAAACU | 2209 |
| GUUUAUGUUCUCAUGCCCU | 2210 | AGGGCAUGAGAACAUAAAC | 2211 |
| UUUAUGUUCUCAUGCCCUC | 2212 | GAGGGCAUGAGAACAUAAA | 2213 |
| UUAUGUUCUCAUGCCCUCA | 2214 | UGAGGGCAUGAGAACAUAA | 2215 |
| UAUGUUCUCAUGCCCUCAA | 2216 | UUGAGGGCAUGAGAACAUA | 2217 |
| AUGUUCUCAUGCCCUCAAU | 2218 | AUUGAGGGCAUGAGAACAU | 2219 |
| UGUUCUCAUGCCCUCAAUC | 2220 | GAUUGAGGGCAUGAGAACA | 2221 |
| GUUCUCAUGCCCUCAAUCU | 2222 | AGAUUGAGGGCAUGAGAAC | 2223 |
| UUCUCAUGCCCUCAAUCUG | 2224 | CAGAUUGAGGGCAUGAGAA | 2225 |
| UCUCAUGCCCUCAAUCUGU | 2226 | ACAGAUUGAGGGCAUGAGA | 2227 |
| CUCAUGCCCUCAAUCUGUA | 2228 | UACAGAUUGAGGGCAUGAG | 2229 |
| UCAUGCCCUCAAUCUGUAA | 2230 | UUACAGAUUGAGGGCAUGA | 2231 |
| CAUGCCCUCAAUCUGUAAA | 2232 | UUUACAGAUUGAGGGCAUG | 2233 |
| AUGCCCUCAAUCUGUAAAU | 2234 | AUUUACAGAUUGAGGGCAU | 2235 |
| UGCCCUCAAUCUGUAAAUU | 2236 | AAUUUACAGAUUGAGGGCA | 2237 |
| GCCCUCAAUCUGUAAAUUU | 2238 | AAAUUUACAGAUUGAGGGC | 2239 |
| CCCUCAAUCUGUAAAUUUU | 2240 | AAAAUUUACAGAUUGAGGG | 2241 |
| CCUCCCAGGCAUCCCAUAC | 2242 | GUAUGGGAUGCCUGGGAGG | 2243 |
| CUCCCAGGCAUCCCAUACC | 2244 | GGUAUGGGAUGCCUGGGAG | 2245 |
| UCCCAGGCAUCCCAUACCA | 2246 | UGGUAUGGGAUGCCUGGGA | 2247 |
| CCCAGGCAUCCCAUACCAG | 2248 | CUGGUAUGGGAUGCCUGGG | 2249 |
| CCCAUACCAGCACCGUUCC | 2250 | GGAACGGUGCUGGUAUGGG | 2251 |
| CCAUACCAGCACCGUUCCU | 2252 | AGGAACGGUGCUGGUAUGG | 2253 |
| AACCCUGAGCUUCACACUU | 2254 | AAGUGUGAAGCUCAGGGUU | 2255 |
| ACCCUGAGCUUCACACUUA | 2256 | UAAGUGUGAAGCUCAGGGU | 2257 |
| CCCUGAGCUUCACACUUAA | 2258 | UUAAGUGUGAAGCUCAGGG | 2259 |
| CCUGAGCUUCACACUUAAA | 2260 | UUUAAGUGUGAAGCUCAGG | 2261 |
| GAGGGCCCUUCAGAGCAGA | 2262 | UCUGCUCUGAAGGGCCCUC | 2263 |
| AGGGCCCUUCAGAGCAGAG | 2264 | CUCUGCUCUGAAGGGCCCU | 2265 |
| GGGCCCUUCAGAGCAGAGU | 2266 | ACUCUGCUCUGAAGGGCCC | 2267 |
| CCCUUCAGAGCAGAGUCCA | 2268 | UGGACUCUGCUCUGAAGGG | 2269 |
| AGAGCAGAGUCCACAGGCG | 2270 | CGCCUGUGGACUCUGCUCU | 2271 |
| ACAGGCGGGUGGUGCUACA | 2272 | UGUAGCACCACCCGCCUGU | 2273 |
| GUAAGAUACACUUUAAGCC | 2274 | GGCUUAAAGUGUAUCUUAC | 2275 |
| UAAGAUACACUUUAAGCCA | 2276 | UGGCUUAAAGUGUAUCUUA | 2277 |
| ACACUUUAAGCCAGACACC | 2278 | GGUGUCUGGCUUAAAGUGU | 2279 |
| CACUUUAAGCCAGACACCU | 2280 | AGGUGUCUGGCUUAAAGUG | 2281 |
| ACUUUAAGCCAGACACCUA | 2282 | UAGGUGUCUGGCUUAAAGU | 2283 |
| CUUCAGUUCACUGCCCAUG | 2284 | CAUGGGCAGUGAACUGAAG | 2285 |
| UUCAGUUCACUGCCCAUGU | 2286 | ACAUGGGCAGUGAACUGAA | 2287 |
| UCAGUUCACUGCCCAUGUG | 2288 | CACAUGGGCAGUGAACUGA | 2289 |
| CACUGCCCAUGUGAUACUG | 2290 | CAGUAUCACAUGGGCAGUG | 2291 |
| ACUGCCCAUGUGAUACUGA | 2292 | UCAGUAUCACAUGGGCAGU | 2293 |
| CUGCCCAUGUGAUACUGAU | 2294 | AUCAGUAUCACAUGGGCAG | 2295 |
| UGCCCAUGUGAUACUGAUU | 2296 | AAUCAGUAUCACAUGGGCA | 2297 |
| GCCCAUGUGAUACUGAUUG | 2298 | CAAUCAGUAUCACAUGGGC | 2299 |
| CCCAUGUGAUACUGAUUGC | 2300 | GCAAUCAGUAUCACAUGGG | 2301 |
| CCAUGUGAUACUGAUUGCC | 2302 | GGCAAUCAGUAUCACAUGG | 2303 |
| CAUGUGAUACUGAUUGCCA | 2304 | UGGCAAUCAGUAUCACAUG | 2305 |
| AUGUGAUACUGAUUGCCAC | 2306 | GUGGCAAUCAGUAUCACAU | 2307 |
| AUACUGAUUGCCACAUUAA | 2308 | UUAAUGUGGCAAUCAGUAU | 2309 |
| UACUGAUUGCCACAUUAAG | 2310 | CUUAAUGUGGCAAUCAGUA | 2311 |
| ACUGAUUGCCACAUUAAGG | 2312 | CCUUAAUGUGGCAAUCAGU | 2313 |
| CUGAUUGCCACAUUAAGGU | 2314 | ACCUUAAUGUGGCAAUCAG | 2315 |
| UGAUUGCCACAUUAAGGUU | 2316 | AACCUUAAUGUGGCAAUCA | 2317 |
| GAUUGCCACAUUAAGGUUG | 2318 | CAACCUUAAUGUGGCAAUC | 2319 |
| AUUGCCACAUUAAGGUUGA | 2320 | UCAACCUUAAUGUGGCAAU | 2321 |
| UUGCCACAUUAAGGUUGAA | 2322 | UUCAACCUUAAUGUGGCAA | 2323 |
| ACAGCAUGGCUCAGAGUCU | 2324 | AGACUCUGAGCCAUGCUGU | 2325 |
| CAUGGCUCAGAGUCUAGAG | 2326 | CUCUAGACUCUGAGCCAUG | 2327 |
| AAAGUGAUCACCAAGCUGU | 2328 | ACAGCUUGGUGAUCACUUU | 2329 |
| AAGUGAUCACCAAGCUGUC | 2330 | GACAGCUUGGUGAUCACUU | 2331 |
| AGUGAUCACCAAGCUGUCU | 2332 | AGACAGCUUGGUGAUCACU | 2333 |
| GUGAUCACCAAGCUGUCUC | 2334 | GAGACAGCUUGGUGAUCAC | 2335 |
| UGAUCACCAAGCUGUCUCA | 2336 | UGAGACAGCUUGGUGAUCA | 2337 |
| GAUCACCAAGCUGUCUCAU | 2338 | AUGAGACAGCUUGGUGAUC | 2339 |
| UCACCAAGCUGUCUCAUCA | 2340 | UGAUGAGACAGCUUGGUGA | 2341 |
| CACCAAGCUGUCUCAUCAC | 2342 | GUGAUGAGACAGCUUGGUG | 2343 |
| ACCAAGCUGUCUCAUCACC | 2344 | GGUGAUGAGACAGCUUGGU | 2345 |
| CCAAGCUGUCUCAUCACCA | 2346 | UGGUGAUGAGACAGCUUGG | 2347 |
| CAAGCUGUCUCAUCACCAA | 2348 | UUGGUGAUGAGACAGCUUG | 2349 |
| AAGCUGUCUCAUCACCAAA | 2350 | UUUGGUGAUGAGACAGCUU | 2351 |
| AGCUGUCUCAUCACCAAAU | 2352 | AUUUGGUGAUGAGACAGCU | 2353 |
| GCUGUCUCAUCACCAAAUA | 2354 | UAUUUGGUGAUGAGACAGC | 2355 |
| UCUCAUCACCAAAUAGGUA | 2356 | UACCUAUUUGGUGAUGAGA | 2357 |
| CAUCACCAAAUAGGUAGUC | 2358 | GACUACCUAUUUGGUGAUG | 2359 |
| AUCACCAAAUAGGUAGUCA | 2360 | UGACUACCUAUUUGGUGAU | 2361 |
| UCACCAAAUAGGUAGUCAA | 2362 | UUGACUACCUAUUUGGUGA | 2363 |
| CACCAAAUAGGUAGUCAAG | 2364 | CUUGACUACCUAUUUGGUG | 2365 |
| ACCAAAUAGGUAGUCAAGG | 2366 | CCUUGACUACCUAUUUGGU | 2367 |
| CCAAAUAGGUAGUCAAGGC | 2368 | GCCUUGACUACCUAUUUGG | 2369 |
| CAAAUAGGUAGUCAAGGCA | 2370 | UGCCUUGACUACCUAUUUG | 2371 |
| AAAUAGGUAGUCAAGGCAG | 2372 | CUGCCUUGACUACCUAUUU | 2373 |
| AAUAGGUAGUCAAGGCAGC | 2374 | GCUGCCUUGACUACCUAUU | 2375 |
| GCAGCUUGCCUUCCACCAG | 2376 | CUGGUGGAAGGCAAGCUGC | 2377 |
| CAGCUUGCCUUCCACCAGA | 2378 | UCUGGUGGAAGGCAAGCUG | 2379 |
| AGCUUGCCUUCCACCAGAC | 2380 | GUCUGGUGGAAGGCAAGCU | 2381 |
| GCUUGCCUUCCACCAGACG | 2382 | CGUCUGGUGGAAGGCAAGC | 2383 |
| CUUGCCUUCCACCAGACGC | 2384 | GCGUCUGGUGGAAGGCAAG | 2385 |
| UGCCUUCCACCAGACGCCA | 2386 | UGGCGUCUGGUGGAAGGCA | 2387 |
| CCCGACUCACUGUGGGUAC | 2388 | GUACCCACAGUGAGUCGGG | 2389 |
| CCGACUCACUGUGGGUACC | 2390 | GGUACCCACAGUGAGUCGG | 2391 |
| CGACUCACUGUGGGUACCC | 2392 | GGGUACCCACAGUGAGUCG | 2393 |
| GACUCACUGUGGGUACCCU | 2394 | AGGGUACCCACAGUGAGUC | 2395 |
| ACUCACUGUGGGUACCCUU | 2396 | AAGGGUACCCACAGUGAGU | 2397 |
| CUCACUGUGGGUACCCUUC | 2398 | GAAGGGUACCCACAGUGAG | 2399 |
| UCACUGUGGGUACCCUUCU | 2400 | AGAAGGGUACCCACAGUGA | 2401 |
| CACUGUGGGUACCCUUCUA | 2402 | UAGAAGGGUACCCACAGUG | 2403 |
| ACUGUGGGUACCCUUCUAC | 2404 | GUAGAAGGGUACCCACAGU | 2405 |
| CUGUGGGUACCCUUCUACA | 2406 | UGUAGAAGGGUACCCACAG | 2407 |
| UGUGGGUACCCUUCUACAC | 2408 | GUGUAGAAGGGUACCCACA | 2409 |
| GGGUACCCUUCUACACUGA | 2410 | UCAGUGUAGAAGGGUACCC | 2411 |
| UUCUACACUGACCAGCAAG | 2412 | CUUGCUGGUCAGUGUAGAA | 2413 |
| UCUACACUGACCAGCAAGC | 2414 | GCUUGCUGGUCAGUGUAGA | 2415 |
| CUACACUGACCAGCAAGCU | 2416 | AGCUUGCUGGUCAGUGUAG | 2417 |
| UACACUGACCAGCAAGCUA | 2418 | UAGCUUGCUGGUCAGUGUA | 2419 |
| ACACUGACCAGCAAGCUAG | 2420 | CUAGCUUGCUGGUCAGUGU | 2421 |
| CACUGACCAGCAAGCUAGG | 2422 | CCUAGCUUGCUGGUCAGUG | 2423 |
| ACUGACCAGCAAGCUAGGC | 2424 | GCCUAGCUUGCUGGUCAGU | 2425 |
| CUCACCCAACUCUAAAUUG | 2426 | CAAUUUAGAGUUGGGUGAG | 2427 |
| UCACCCAACUCUAAAUUGU | 2428 | ACAAUUUAGAGUUGGGUGA | 2429 |
| CACCCAACUCUAAAUUGUG | 2430 | CACAAUUUAGAGUUGGGUG | 2431 |
| ACCCAACUCUAAAUUGUGC | 2432 | GCACAAUUUAGAGUUGGGU | 2433 |
| CCCAACUCUAAAUUGUGCC | 2434 | GGCACAAUUUAGAGUUGGG | 2435 |
| CCAACUCUAAAUUGUGCCG | 2436 | CGGCACAAUUUAGAGUUGG | 2437 |
| CAACUCUAAAUUGUGCCGC | 2438 | GCGGCACAAUUUAGAGUUG | 2439 |
| AACUCUAAAUUGUGCCGCU | 2440 | AGCGGCACAAUUUAGAGUU | 2441 |
| ACUCUAAAUUGUGCCGCUU | 2442 | AAGCGGCACAAUUUAGAGU | 2443 |
| CUCUAAAUUGUGCCGCUUA | 2444 | UAAGCGGCACAAUUUAGAG | 2445 |
| UAAAUUGUGCCGCUUAGAC | 2446 | GUCUAAGCGGCACAAUUUA | 2447 |
| AAAUUGUGCCGCUUAGACU | 2448 | AGUCUAAGCGGCACAAUUU | 2449 |
| AAUUGUGCCGCUUAGACUU | 2450 | AAGUCUAAGCGGCACAAUU | 2451 |
| AUUGUGCCGCUUAGACUUA | 2452 | UAAGUCUAAGCGGCACAAU | 2453 |
| UUGUGCCGCUUAGACUUAG | 2454 | CUAAGUCUAAGCGGCACAA | 2455 |
| UGUGCCGCUUAGACUUAGC | 2456 | GCUAAGUCUAAGCGGCACA | 2457 |
| GUGCCGCUUAGACUUAGCU | 2458 | AGCUAAGUCUAAGCGGCAC | 2459 |
| UGCCGCUUAGACUUAGCUG | 2460 | CAGCUAAGUCUAAGCGGCA | 2461 |
| GCCGCUUAGACUUAGCUGU | 2462 | ACAGCUAAGUCUAAGCGGC | 2463 |
| CCGCUUAGACUUAGCUGUC | 2464 | GACAGCUAAGUCUAAGCGG | 2465 |
| GCUUAGACUUAGCUGUCAG | 2466 | CUGACAGCUAAGUCUAAGC | 2467 |
| CUUAGACUUAGCUGUCAGU | 2468 | ACUGACAGCUAAGUCUAAG | 2469 |
| UUAGACUUAGCUGUCAGUG | 2470 | CACUGACAGCUAAGUCUAA | 2471 |
| UAGACUUAGCUGUCAGUGU | 2472 | ACACUGACAGCUAAGUCUA | 2473 |
| AGACUUAGCUGUCAGUGUG | 2474 | CACACUGACAGCUAAGUCU | 2475 |
| GACUUAGCUGUCAGUGUGA | 2476 | UCACACUGACAGCUAAGUC | 2477 |
| GGUGAUUCCUAAGAUUUCC | 2478 | GGAAAUCUUAGGAAUCACC | 2479 |
| AUUCCUAAGAUUUCCUUGG | 2480 | CCAAGGAAAUCUUAGGAAU | 2481 |
| UCCUAAGAUUUCCUUGGGU | 2482 | ACCCAAGGAAAUCUUAGGA | 2483 |
| CCUAAGAUUUCCUUGGGUA | 2484 | UACCCAAGGAAAUCUUAGG | 2485 |
| CUAAGAUUUCCUUGGGUAU | 2486 | AUACCCAAGGAAAUCUUAG | 2487 |
| UAAGAUUUCCUUGGGUAUC | 2488 | GAUACCCAAGGAAAUCUUA | 2489 |
| AUUUGAGUGUGUGCAUGUG | 2490 | CACAUGCACACACUCAAAU | 2491 |
| UUUGAGUGUGUGCAUGUGU | 2492 | ACACAUGCACACACUCAAA | 2493 |
| UGUGUGCAUGACUUUAAUG | 2494 | CAUUAAAGUCAUGCACACA | 2495 |
| GUGUGCAUGACUUUAAUGA | 2496 | UCAUUAAAGUCAUGCACAC | 2497 |
| UGUGCAUGACUUUAAUGAC | 2498 | GUCAUUAAAGUCAUGCACA | 2499 |
| GUGCAUGACUUUAAUGACU | 2500 | AGUCAUUAAAGUCAUGCAC | 2501 |
| UGCAUGACUUUAAUGACUU | 2502 | AAGUCAUUAAAGUCAUGCA | 2503 |
| GCAUGACUUUAAUGACUUU | 2504 | AAAGUCAUUAAAGUCAUGC | 2505 |
| GGGUUGAAGGAAGUUUGGG | 2506 | CCCAAACUUCCUUCAACCC | 2507 |
| GGUUGAAGGAAGUUUGGGU | 2508 | ACCCAAACUUCCUUCAACC | 2509 |
| GUUGAAGGAAGUUUGGGUU | 2510 | AACCCAAACUUCCUUCAAC | 2511 |
| UUGAAGGAAGUUUGGGUUG | 2512 | CAACCCAAACUUCCUUCAA | 2513 |
| UGAAGGAAGUUUGGGUUGA | 2514 | UCAACCCAAACUUCCUUCA | 2515 |
| GAAGGAAGUUUGGGUUGAU | 2516 | AUCAACCCAAACUUCCUUC | 2517 |
| AAGGAAGUUUGGGUUGAUU | 2518 | AAUCAACCCAAACUUCCUU | 2519 |
| GUGGUGUUUUGUUUAAUAG | 2520 | CUAUUAAACAAAACACCAC | 2521 |
| GGUGUUUUGUUUAAUAGAG | 2522 | CUCUAUUAAACAAAACACC | 2523 |
| CAGCUGGUCUGACAGAUUU | 2524 | AAAUCUGUCAGACCAGCUG | 2525 |
| AGCUGGUCUGACAGAUUUA | 2526 | UAAAUCUGUCAGACCAGCU | 2527 |
| GCUGGUCUGACAGAUUUAA | 2528 | UUAAAUCUGUCAGACCAGC | 2529 |
| CUGGUCUGACAGAUUUAAG | 2530 | CUUAAAUCUGUCAGACCAG | 2531 |
| UGGUCUGACAGAUUUAAGA | 2532 | UCUUAAAUCUGUCAGACCA | 2533 |
| GGUCUGACAGAUUUAAGAA | 2534 | UUCUUAAAUCUGUCAGACC | 2535 |
| ACUCUCAUUCUUAAAAGAC | 2536 | GUCUUUUAAGAAUGAGAGU | 2537 |
| CUCUCAUUCUUAAAAGACU | 2538 | AGUCUUUUAAGAAUGAGAG | 2539 |
| CAUUCUUAAAAGACUUUGG | 2540 | CCAAAGUCUUUUAAGAAUG | 2541 |
| UUCUUAAAAGACUUUGGAC | 2542 | GUCCAAAGUCUUUUAAGAA | 2543 |
| UCUUAAAAGACUUUGGACU | 2544 | AGUCCAAAGUCUUUUAAGA | 2545 |
| CUUAAAAGACUUUGGACUU | 2546 | AAGUCCAAAGUCUUUUAAG | 2547 |
| CUUUGGACUUAAAUUCUAG | 2548 | CUAGAAUUUAAGUCCAAAG | 2549 |
| UUUGGACUUAAAUUCUAGC | 2550 | GCUAGAAUUUAAGUCCAAA | 2551 |
| UUGGACUUAAAUUCUAGCA | 2552 | UGCUAGAAUUUAAGUCCAA | 2553 |
| GGACUUAAAUUCUAGCAUU | 2554 | AAUGCUAGAAUUUAAGUCC | 2555 |
| UAGCAUUUUAGACUAGGAC | 2556 | GUCCUAGUCUAAAAUGCUA | 2557 |
| AGCAUUUUAGACUAGGACU | 2558 | AGUCCUAGUCUAAAAUGCU | 2559 |
| GACUGUUCUACUGUGAAGA | 2560 | UCUUCACAGUAGAACAGUC | 2561 |
| AAGUUCUGUCUCCUUUAGC | 2562 | GCUAAAGGAGACAGAACUU | 2563 |
| AGUUCUGUCUCCUUUAGCC | 2564 | GGCUAAAGGAGACAGAACU | 2565 |
| GUUCUGUCUCCUUUAGCCC | 2566 | GGGCUAAAGGAGACAGAAC | 2567 |
| UUCUGUCUCCUUUAGCCCG | 2568 | CGGGCUAAAGGAGACAGAA | 2569 |
| UCUGUCUCCUUUAGCCCGG | 2570 | CCGGGCUAAAGGAGACAGA | 2571 |
| CUGUCUCCUUUAGCCCGGU | 2572 | ACCGGGCUAAAGGAGACAG | 2573 |
| UGUCUCCUUUAGCCCGGUU | 2574 | AACCGGGCUAAAGGAGACA | 2575 |
| GUCUCCUUUAGCCCGGUUU | 2576 | AAACCGGGCUAAAGGAGAC | 2577 |
| GCCCGGUUUGUUUCUCCCU | 2578 | AGGGAGAAACAAACCGGGC | 2579 |
| CCCGGUUUGUUUCUCCCUG | 2580 | CAGGGAGAAACAAACCGGG | 2581 |
| UGUUUCUCCCUGCUCAGGU | 2582 | ACCUGAGCAGGGAGAAACA | 2583 |
| UUUCUCCCUGCUCAGGUCU | 2584 | AGACCUGAGCAGGGAGAAA | 2585 |
| UUCUCCCUGCUCAGGUCUA | 2586 | UAGACCUGAGCAGGGAGAA | 2587 |
| UCUCCCUGCUCAGGUCUAG | 2588 | CUAGACCUGAGCAGGGAGA | 2589 |
| CUCCCUGCUCAGGUCUAGA | 2590 | UCUAGACCUGAGCAGGGAG | 2591 |
| UCCCUGCUCAGGUCUAGAA | 2592 | UUCUAGACCUGAGCAGGGA | 2593 |
| CCCUGCUCAGGUCUAGAAU | 2594 | AUUCUAGACCUGAGCAGGG | 2595 |
| CCUGCUCAGGUCUAGAAUC | 2596 | GAUUCUAGACCUGAGCAGG | 2597 |
| CUGCUCAGGUCUAGAAUCC | 2598 | GGAUUCUAGACCUGAGCAG | 2599 |
| UGCUCAGGUCUAGAAUCCC | 2600 | GGGAUUCUAGACCUGAGCA | 2601 |
| CAGGUCUAGAAUCCCAAGC | 2602 | GCUUGGGAUUCUAGACCUG | 2603 |
| GUCUAGAAUCCCAAGCAGU | 2604 | ACUGCUUGGGAUUCUAGAC | 2605 |
| CCAAGCAGUGUUCUUUUCU | 2606 | AGAAAAGAACACUGCUUGG | 2607 |
| CAAGCAGUGUUCUUUUCUG | 2608 | CAGAAAAGAACACUGCUUG | 2609 |
| AAGCAGUGUUCUUUUCUGG | 2610 | CCAGAAAAGAACACUGCUU | 2611 |
| AGCAGUGUUCUUUUCUGGU | 2612 | ACCAGAAAAGAACACUGCU | 2613 |
| GCAGUGUUCUUUUCUGGUG | 2614 | CACCAGAAAAGAACACUGC | 2615 |
| CAGUGUUCUUUUCUGGUGA | 2616 | UCACCAGAAAAGAACACUG | 2617 |
| CACUGUGAGCCGCAGAUGU | 2618 | ACAUCUGCGGCUCACAGUG | 2619 |
| UGAGCCGCAGAUGUGACUU | 2620 | AAGUCACAUCUGCGGCUCA | 2621 |
| GAGCCGCAGAUGUGACUUU | 2622 | AAAGUCACAUCUGCGGCUC | 2623 |
| AGCCGCAGAUGUGACUUUU | 2624 | AAAAGUCACAUCUGCGGCU | 2625 |
| AGUCAUCUCUUCAGCAAUC | 2626 | GAUUGCUGAAGAGAUGACU | 2627 |
| GUCAUCUCUUCAGCAAUCC | 2628 | GGAUUGCUGAAGAGAUGAC | 2629 |
| UCAUCUCUUCAGCAAUCCA | 2630 | UGGAUUGCUGAAGAGAUGA | 2631 |
| CAUCUCUUCAGCAAUCCAG | 2632 | CUGGAUUGCUGAAGAGAUG | 2633 |
| AUCUCUUCAGCAAUCCAGA | 2634 | UCUGGAUUGCUGAAGAGAU | 2635 |
| CUUCAGCAAUCCAGAGGUU | 2636 | AACCUCUGGAUUGCUGAAG | 2637 |
| UUCAGCAAUCCAGAGGUUC | 2638 | GAACCUCUGGAUUGCUGAA | 2639 |
| UCAGCAAUCCAGAGGUUCC | 2640 | GGAACCUCUGGAUUGCUGA | 2641 |
| CAGCAAUCCAGAGGUUCCU | 2642 | AGGAACCUCUGGAUUGCUG | 2643 |
| AGCAAUCCAGAGGUUCCUU | 2644 | AAGGAACCUCUGGAUUGCU | 2645 |
| GCAAUCCAGAGGUUCCUUG | 2646 | CAAGGAACCUCUGGAUUGC | 2647 |
| CAAUCCAGAGGUUCCUUGA | 2648 | UCAAGGAACCUCUGGAUUG | 2649 |
| AAUCCAGAGGUUCCUUGAC | 2650 | GUCAAGGAACCUCUGGAUU | 2651 |
| AUCCAGAGGUUCCUUGACC | 2652 | GGUCAAGGAACCUCUGGAU | 2653 |
| GUUCCUUGACCUCAUUAUU | 2654 | AAUAAUGAGGUCAAGGAAC | 2655 |
| UCCUUGACCUCAUUAUUUG | 2656 | CAAAUAAUGAGGUCAAGGA | 2657 |
| CCUUGACCUCAUUAUUUGU | 2658 | ACAAAUAAUGAGGUCAAGG | 2659 |
| CUUGACCUCAUUAUUUGUC | 2660 | GACAAAUAAUGAGGUCAAG | 2661 |
| UUGACCUCAUUAUUUGUCC | 2662 | GGACAAAUAAUGAGGUCAA | 2663 |
| UGACCUCAUUAUUUGUCCU | 2664 | AGGACAAAUAAUGAGGUCA | 2665 |
| GACCUCAUUAUUUGUCCUA | 2666 | UAGGACAAAUAAUGAGGUC | 2667 |
| ACCUCAUUAUUUGUCCUAU | 2668 | AUAGGACAAAUAAUGAGGU | 2669 |
| CUCAUUAUUUGUCCUAUCU | 2670 | AGAUAGGACAAAUAAUGAG | 2671 |
| UUUGUCCUAUCUCUCCCUU | 2672 | AAGGGAGAGAUAGGACAAA | 2673 |
| UUGUCCUAUCUCUCCCUUA | 2674 | UAAGGGAGAGAUAGGACAA | 2675 |
| UGUCCUAUCUCUCCCUUAU | 2676 | AUAAGGGAGAGAUAGGACA | 2677 |
| GUCCUAUCUCUCCCUUAUA | 2678 | UAUAAGGGAGAGAUAGGAC | 2679 |
| UAUCUCUCCCUUAUAGUCC | 2680 | GGACUAUAAGGGAGAGAUA | 2681 |
| AUCUCUCCCUUAUAGUCCU | 2682 | AGGACUAUAAGGGAGAGAU | 2683 |
| UCUCUCCCUUAUAGUCCUA | 2684 | UAGGACUAUAAGGGAGAGA | 2685 |
| CUCUCCCUUAUAGUCCUAA | 2686 | UUAGGACUAUAAGGGAGAG | 2687 |
| UUAUAGUCCUAAGCCAAGA | 2688 | UCUUGGCUUAGGACUAUAA | 2689 |
| UCCUAAGCCAAGACAUUUG | 2690 | CAAAUGUCUUGGCUUAGGA | 2691 |
| CCUAAGCCAAGACAUUUGA | 2692 | UCAAAUGUCUUGGCUUAGG | 2693 |
| CUAAGCCAAGACAUUUGAC | 2694 | GUCAAAUGUCUUGGCUUAG | 2695 |
| UAAGCCAAGACAUUUGACC | 2696 | GGUCAAAUGUCUUGGCUUA | 2697 |
| CCAAGACAUUUGACCUUUG | 2698 | CAAAGGUCAAAUGUCUUGG | 2699 |
| CAAGACAUUUGACCUUUGA | 2700 | UCAAAGGUCAAAUGUCUUG | 2701 |
| ACCUUUGCAGUGUCAUGUG | 2702 | CACAUGACACUGCAAAGGU | 2703 |
| GUGUCAUGUGAGGGCGUCA | 2704 | UGACGCCCUCACAUGACAC | 2705 |
| UGUCAUGUGAGGGCGUCAG | 2706 | CUGACGCCCUCACAUGACA | 2707 |
| GUCAUGUGAGGGCGUCAGU | 2708 | ACUGACGCCCUCACAUGAC | 2709 |
| UCAUGUGAGGGCGUCAGUA | 2710 | UACUGACGCCCUCACAUGA | 2711 |
| CAUGUGAGGGCGUCAGUAU | 2712 | AUACUGACGCCCUCACAUG | 2713 |
| AUGUGAGGGCGUCAGUAUA | 2714 | UAUACUGACGCCCUCACAU | 2715 |
| UGUGAGGGCGUCAGUAUAG | 2716 | CUAUACUGACGCCCUCACA | 2717 |
| GUGAGGGCGUCAGUAUAGA | 2718 | UCUAUACUGACGCCCUCAC | 2719 |
| UGAGGGCGUCAGUAUAGAG | 2720 | CUCUAUACUGACGCCCUCA | 2721 |
| GAGGGCGUCAGUAUAGAGG | 2722 | CCUCUAUACUGACGCCCUC | 2723 |
| AGGGCGUCAGUAUAGAGGC | 2724 | GCCUCUAUACUGACGCCCU | 2725 |
| GGGCGUCAGUAUAGAGGCC | 2726 | GGCCUCUAUACUGACGCCC | 2727 |
| GGCGUCAGUAUAGAGGCCU | 2728 | AGGCCUCUAUACUGACGCC | 2729 |
| GCGUCAGUAUAGAGGCCUU | 2730 | AAGGCCUCUAUACUGACGC | 2731 |
| CGUCAGUAUAGAGGCCUUU | 2732 | AAAGGCCUCUAUACUGACG | 2733 |
| GUCAGUAUAGAGGCCUUUG | 2734 | CAAAGGCCUCUAUACUGAC | 2735 |
| UCAGUAUAGAGGCCUUUGC | 2736 | GCAAAGGCCUCUAUACUGA | 2737 |
| AGUAUAGAGGCCUUUGCAU | 2738 | AUGCAAAGGCCUCUAUACU | 2739 |
| GUAUAGAGGCCUUUGCAUC | 2740 | GAUGCAAAGGCCUCUAUAC | 2741 |
| UAUAGAGGCCUUUGCAUCU | 2742 | AGAUGCAAAGGCCUCUAUA | 2743 |
| AUAGAGGCCUUUGCAUCUG | 2744 | CAGAUGCAAAGGCCUCUAU | 2745 |
| GCCUUUGCAUCUGGGCCUG | 2746 | CAGGCCCAGAUGCAAAGGC | 2747 |
| CCUUUGCAUCUGGGCCUGG | 2748 | CCAGGCCCAGAUGCAAAGG | 2749 |
| CUUUGCAUCUGGGCCUGGC | 2750 | GCCAGGCCCAGAUGCAAAG | 2751 |
| UUUGCAUCUGGGCCUGGCA | 2752 | UGCCAGGCCCAGAUGCAAA | 2753 |
| UUGCAUCUGGGCCUGGCAC | 2754 | GUGCCAGGCCCAGAUGCAA | 2755 |
| GUCUGGAUUUCUCUUGGGA | 2756 | UCCCAAGAGAAAUCCAGAC | 2757 |
| UGGAUUUCUCUUGGGAUCU | 2758 | AGAUCCCAAGAGAAAUCCA | 2759 |
| GGAUUUCUCUUGGGAUCUA | 2760 | UAGAUCCCAAGAGAAAUCC | 2761 |
| GAUUUCUCUUGGGAUCUAA | 2762 | UUAGAUCCCAAGAGAAAUC | 2763 |
| GUGGGAUCUUCUGGACAGA | 2764 | UCUGUCCAGAAGAUCCCAC | 2765 |
| UGGGAUCUUCUGGACAGAC | 2766 | GUCUGUCCAGAAGAUCCCA | 2767 |
| GGGAUCUUCUGGACAGACA | 2768 | UGUCUGUCCAGAAGAUCCC | 2769 |
| CUUUGCAGAGGACACGCUG | 2770 | CAGCGUGUCCUCUGCAAAG | 2771 |
| CCCUGCAUCAUCUGUCUUG | 2772 | CAAGACAGAUGAUGCAGGG | 2773 |
| UGCAUCAUCUGUCUUGCGU | 2774 | ACGCAAGACAGAUGAUGCA | 2775 |
| GCAUCAUCUGUCUUGCGUG | 2776 | CACGCAAGACAGAUGAUGC | 2777 |
| CAUCAUCUGUCUUGCGUGC | 2778 | GCACGCAAGACAGAUGAUG | 2779 |
| AUCAUCUGUCUUGCGUGCU | 2780 | AGCACGCAAGACAGAUGAU | 2781 |
| UCAUCUGUCUUGCGUGCUA | 2782 | UAGCACGCAAGACAGAUGA | 2783 |
| CAUCUGUCUUGCGUGCUAU | 2784 | AUAGCACGCAAGACAGAUG | 2785 |
| AUCUGUCUUGCGUGCUAUU | 2786 | AAUAGCACGCAAGACAGAU | 2787 |
| UCUGUCUUGCGUGCUAUUU | 2788 | AAAUAGCACGCAAGACAGA | 2789 |
| CUGUCUUGCGUGCUAUUUC | 2790 | GAAAUAGCACGCAAGACAG | 2791 |
| GCGUGCUAUUUCAGAGUGG | 2792 | CCACUCUGAAAUAGCACGC | 2793 |
| CGUGCUAUUUCAGAGUGGG | 2794 | CCCACUCUGAAAUAGCACG | 2795 |
| AACUAUUUGCCUUCUGGAG | 2796 | CUCCAGAAGGCAAAUAGUU | 2797 |
| ACUAUUUGCCUUCUGGAGC | 2798 | GCUCCAGAAGGCAAAUAGU | 2799 |
| CUAUUUGCCUUCUGGAGCU | 2800 | AGCUCCAGAAGGCAAAUAG | 2801 |
| UAUUUGCCUUCUGGAGCUC | 2802 | GAGCUCCAGAAGGCAAAUA | 2803 |
| UUUGCCUUCUGGAGCUCUU | 2804 | AAGAGCUCCAGAAGGCAAA | 2805 |
| UUGCCUUCUGGAGCUCUUU | 2806 | AAAGAGCUCCAGAAGGCAA | 2807 |
| UGCCUUCUGGAGCUCUUUG | 2808 | CAAAGAGCUCCAGAAGGCA | 2809 |
| GCCUUCUGGAGCUCUUUGU | 2810 | ACAAAGAGCUCCAGAAGGC | 2811 |
| CCUUCUGGAGCUCUUUGUG | 2812 | CACAAAGAGCUCCAGAAGG | 2813 |

[0033] The inhibitory nucleic acid molecules can comprise RNA, DNA, or both RNA and DNA. The inhibitory nucleic acid molecules can also be linked or fused to a heterologous nucleic acid sequence, such as in a vector, or a heterologous label. For example, the 65/873,160 inhibitory nucleic acid molecules can be within a vector or as an exogenous donor sequence comprising the inhibitory nucleic acid molecule and a heterologous nucleic acid sequence. The inhibitory nucleic acid molecules can also be linked or fused to a heterologous label. The label can be directly detectable (such as, for example, fluorophore) or indirectly detectable (such as, for example, hapten, enzyme, or fluorophore quencher). Such labels can be detectable by spectroscopic, photochemical, biochemical, immunochemical, or chemical means. Such labels include, for example, radiolabels, pigments, dyes, chromogens, spin labels, and fluorescent labels. The label can also be, for example, a chemiluminescent substance; a metal-containing substance; or an enzyme, where there occurs an enzyme-dependent secondary generation of signal. The term “label” can also refer to a “tag” or hapten that can bind selectively to a conjugated molecule such that the conjugated molecule, when added subsequently along with a substrate, is used to generate a detectable signal. For example, biotin can be used as a tag along with an avidin or streptavidin conjugate of horseradish peroxidate (HRP) to bind to the tag, and examined using a calorimetric substrate (such as, for example, tetramethylbenzidine (TMB)) or a fluorogenic substrate to detect the presence of HRP. Exemplary labels that can be used as tags to facilitate purification include, but are not limited to, myc, HA, FLAG or 3×FLAG, 6×His or polyhistidine, glutathione-S-transferase (GST), maltose binding protein, an epitope tag, or the Fc portion of immunoglobulin. Numerous labels include, for example, particles, fluorophores, haptens, enzymes and their calorimetric, fluorogenic and chemiluminescent substrates and other labels.

[0034] The inhibitory nucleic acid molecules can comprise, for example, nucleotides or non-natural or modified nucleotides, such as nucleotide analogs or nucleotide substitutes. Such nucleotides include a nucleotide that contains a modified base, sugar, or phosphate group, or that incorporates a non-natural moiety in its structure. Examples of non-natural nucleotides include, but are not limited to, dideoxynucleotides, biotinylated, aminated, deaminated, alkylated, benzylated, and fluorophor-labeled nucleotides.

[0035] The inhibitory nucleic acid molecules can also comprise one or more nucleotide analogs or substitutions. A nucleotide analog is a nucleotide which contains a modification to either the base, sugar, or phosphate moieties. Modifications to the base moiety include, but are not limited to, natural and synthetic modifications of A, C, G, and T/U, as well as different purine or pyrimidine bases such as, for example, pseudouridine, uracil-5-yl, hypoxanthin-9-yl (I), and 2-aminoadenin-9-yl. Modified bases include, but are not limited to, 5-methylcytosine (5-me-C), 5-hydroxymethyl cytosine, xanthine, hypoxanthine, 2-aminoadenine, 6-methyl and other alkyl derivatives of adenine and guanine, 2-propyl and other alkyl derivatives of adenine and guanine, 2-thiouracil, 2-thiothymine and 2-thiocytosine, 5-halouracil and cytosine, 5-propynyl uracil and cytosine, 6-azo uracil, cytosine and thymine, 5-uracil (pseudouracil), 4-thiouracil, 8-halo, 8-amino, 8-thiol, 8-thioalkyl, 8-hydroxyl and other 8-substituted adenines and guanines, 5-halo (such as, for example, 5-bromo), 5-trifluoromethyl and other 5-substituted uracils and cytosines, 7-methylguanine, 7-methyladenine, 8-azaguanine, 8-azaadenine, 7-deazaguanine, 7-deazaadenine, 3-deazaguanine, and 3-deazaadenine.

[0036] Nucleotide analogs can also include modifications of the sugar moiety. Modifications to the sugar moiety include, but are not limited to, natural modifications of the ribose and deoxy ribose as well as synthetic modifications. Sugar modifications include, but are not limited to, the following modifications at the 2′ position: OH; F; O-, S-, or N-alkyl; O-, S-, or N-alkenyl; O—, S- or N-alkynyl; or O-alkyl-O-alkyl, wherein the alkyl, alkenyl, and alkynyl may be substituted or unsubstituted C₁₋₁₀alkyl or C₂₋₁₀alkenyl, and C₂₋₁₀alkynyl. Exemplary 2′ sugar modifications also include, but are not limited to,—O [(CH₂)ₙO]ₘCH₃, —O(CH₂)ₙOCH₃, —O(CH₂)ₙNH₂, —O(CH₂)ₙCH₃, —O(CH₂)ₙ—ONH₂, and —O(CH₂)ₙON [(CH₂)ₙCH₃)]₂, where n and m, independently, are from 1 to about 10. Other modifications at the 2′ position include, but are not limited to, C₁₋₁₀alkyl, substituted lower alkyl, alkaryl, aralkyl, O-alkaryl or O-aralkyl, SH, SCH₃, OCN, Cl, Br, CN, CF₃, OCF₃, SOCH₃, SO₂CH₃, ONO₂, NO₂, N₃, NH₂, heterocycloalkyl, heterocycloalkaryl, aminoalkylamino, polyalkylamino, substituted silyl, an RNA cleaving group, a reporter group, an intercalator, a group for improving the pharmacokinetic properties of an oligonucleotide, or a group for improving the pharmacodynamic properties of an oligonucleotide, and other substituents having similar properties. Similar modifications may also be made at other positions on the sugar, particularly the 3′ position of the sugar on the 3′ terminal nucleotide or in 2′-5′ linked oligonucleotides and the 5′ position of 5′ terminal nucleotide. Modified sugars can also include those that contain modifications at the bridging ring oxygen, such as CH₂ and S. Nucleotide sugar analogs can also have sugar mimetics, such as cyclobutyl moieties in place of the pentofuranosyl sugar.

[0037] Nucleotide analogs can also be modified at the phosphate moiety. Modified phosphate moieties include, but are not limited to, those that can be modified so that the linkage between two nucleotides contains a phosphorothioate, chiral phosphorothioate, phosphorodithioate, phosphotriester, aminoalkylphosphotriester, methyl and other alkyl phosphonates including 3′-alkylene phosphonate and chiral phosphonates, phosphinates, phosphoramidates including 3′-amino phosphoramidate and aminoalkylphosphoramidates, thionophosphoramidates, thionoalkylphosphonates, thionoalkylphosphotriesters, and boranophosphates. These phosphate or modified phosphate linkage between two nucleotides can be through a 3′-5′ linkage or a 2′-5′ linkage, and the linkage can contain inverted polarity such as 3′-5′ to 5′-3′ or 2′-5′ to 5′-2′. Various salts, mixed salts, and free acid forms are also included. Nucleotide substitutes also include peptide nucleic acids (PNAs).

[0038] In some embodiments, the antisense nucleic acid molecules are gapmers, whereby the first one to seven nucleotides at the 5′ and 3′ ends each have 2′-methoxyethyl (2′-MOE) modifications. In some embodiments, the first five nucleotides at the 5′ and 3′ ends each have 2′-MOE modifications. In some embodiments, the first one to seven nucleotides at the 5′ and 3′ ends are RNA nucleotides. In some embodiments, the first five nucleotides at the 5′ and 3′ ends are RNA nucleotides. In some embodiments, each of the backbone linkages between the nucleotides is a phosphorothioate linkage.

[0039] In some embodiments, the siRNA molecules have termini modifications. In some embodiments, the 5′ end of the antisense strand is phosphorylated. In some embodiments, 5′-phosphate analogs that cannot be hydrolyzed, such as 5′-(E)-vinyl-phosphonate are used.

[0040] In some embodiments, the siRNA molecules have backbone modifications. In some embodiments, the modified phosphodiester groups that link consecutive ribose nucleosides have been shown to enhance the stability and in vivo bioavailability of siRNAs The non-ester groups (—OH, ═O) of the phosphodiester linkage can be replaced with sulfur, boron, or acetate to give phosphorothioate, boranophosphate, and phosphonoacetate linkages. In addition, substituting the phosphodiester group with a phosphotriester can facilitate cellular uptake of siRNAs and retention on serum components by eliminating their negative charge. In some embodiments, the siRNA molecules have sugar modifications. In some embodiments, the sugars are deprotonated (reaction catalyzed by exo- and endonucleases) whereby the 2′-hydroxyl can act as a nucleophile and attack the adjacent phosphorous in the phosphodiester bond. Such alternatives include 2′-O-methyl, 2′-O-methoxyethyl, and 2′-fluoro modifications.

[0041] In some embodiments, the siRNA molecules have base modifications. In some embodiments, the bases can be substituted with modified bases such as pseudouridine, 5′-methylcytidine, N6-methyladenosine, inosine, and N7-methylguanosine.

[0042] In some embodiments, the siRNA molecules are conjugated to lipids. Lipids can be conjugated to the 5′ or 3′ termini of siRNA to improve their in vivo bioavailability by allowing them to associate with serum lipoproteins. Representative lipids include, but are not limited to, cholesterol and vitamin E, and fatty acids, such as palmitate and tocopherol.

[0043] In some embodiments, a representative siRNA has the following formula:

Sense: mN*mN*/i2FN/mN/i2FN/mN/i2FN/mN/i2FN/mN/i2FN/mN/i2FN/mN/i2FN/mN/i2FN/*mN*/32FN/

### Antisense:/52FN/*/i2FN/*mN/i2FN/mN/i2FN/mN/i2FN/mN/i2FN/mN/i2FN/mN/i2FN/mN/İ2FN/mN/i2FN/mN*N*N

[0044] wherein: “N” is the base; “2F” is a 2′-F modification; “m” is a 2′-O-methyl modification, “|” is an internal base; and “*” is a phosphorothioate backbone linkage.

[0045] In some embodiments, the siRNA molecules comprise commercially available siRNA such as, for example, siRNA ID Nos: 136748, 136749, 136750, 154471, 154472, 154473, 22411, 22507, 22603, 98933, 99029, and 99125 (catalog #AM16708, ThermoFisher Scientific); siRNA ID Nos: HSS118219, HSS118220, and HSS118221 (catalog #1299001, ThermoFisher Scientific); siRNA ID Nos: MSS218945, MSS218946, and MSS218947 (catalog #1320001, ThermoFisher Scientific); siRNA ID Nos: s114239, s114240, s114241, s144050, s144051, and s144052 (catalog #4390771, ThermoFisher Scientific); and siRNA ID Nos: s23091, s23092, and s23093 (catalog #4392420, ThermoFisher Scientific).

[0046] In any of the embodiments described herein, the inhibitory nucleic acid molecules may be administered, for example, as one to two hour i.v. infusions or s.c. injections. In any of the embodiments described herein, the inhibitory nucleic acid molecules may be administered at dose levels that range from about 50 mg to about 900 mg, from about 100 mg to about 800 mg, from about 150 mg to about 700 mg, or from about 175 to about 640 mg (2.5 to 9.14 mg/kg; 92.5 to 338 mg/m²-based on an assumption of a body weight of 70 kg and a conversion of mg/kg to mg/m² dose levels based on a mg/kg dose multiplier value of 37 for humans).

[0047] The present disclosure also provides vectors comprising any one or more of the inhibitory nucleic acid molecules. In some embodiments, the vectors comprise any one or more of the inhibitory nucleic acid molecules and a heterologous nucleic acid. The vectors can be viral or nonviral vectors capable of transporting a nucleic acid molecule. In some embodiments, the vector is a plasmid or cosmid (such as, for example, a circular double-stranded DNA into which additional DNA segments can be ligated). In some embodiments, the vector is a viral vector, wherein additional DNA segments can be ligated into the viral genome. Expression vectors include, but are not limited to, plasmids, cosmids, retroviruses, adenoviruses, adeno-associated viruses (AAV), plant viruses such as cauliflower mosaic virus and tobacco mosaic virus, yeast artificial chromosomes (YACs), Epstein-Barr (EBV)-derived episomes, and other expression vectors known in the art.

[0048] The present disclosure also provides compositions comprising any one or more of the inhibitory nucleic acid molecules. In some embodiments, the composition is a pharmaceutical composition. In some embodiments, the compositions comprise a carrier and/or excipient. Examples of carriers include, but are not limited to, poly (lactic acid) (PLA) microspheres, poly (D,L-lactic-coglycolic-acid) (PLGA) microspheres, liposomes, micelles, inverse micelles, lipid cochleates, and lipid microtubules. A carrier may comprise a buffered salt solution such as PBS, HBSS, etc.

[0049] In some embodiments, the COLGALT2 inhibitor comprises a nuclease agent that induces one or more nicks or double-strand breaks at a recognition sequence(s) or a DNA-binding protein that binds to a recognition sequence within a COLGALT2 genomic nucleic acid molecule. The recognition sequence can be located within a coding region of the COLGALT2 gene, or within regulatory regions that influence the expression of the gene. A recognition sequence of the DNA-binding protein or nuclease agent can be located in an intron, an exon, a promoter, an enhancer, a regulatory region, or any non-protein coding region. The recognition sequence can include or be proximate to the start codon of the COLGALT2 gene. For example, the recognition sequence can be located about 10, about 20, about 30, about 40, about 50, about 100, about 200, about 300, about 400, about 500, or about 1,000 nucleotides from the start codon. As another example, two or more nuclease agents can be used, each targeting a nuclease recognition sequence including or proximate to the start codon. As another example, two nuclease agents can be used, one targeting a nuclease recognition sequence including or proximate to the start codon, and one targeting a nuclease recognition sequence including or proximate to the stop codon, wherein cleavage by the nuclease agents can result in deletion of the coding region between the two nuclease recognition sequences. Any nuclease agent that induces a nick or double-strand break into a desired recognition sequence can be used in the methods and compositions disclosed herein. Any DNA-binding protein that binds to a desired recognition sequence can be used in the methods and compositions disclosed herein.

[0050] Suitable nuclease agents and DNA-binding proteins for use herein include, but are not limited to, zinc finger protein or zinc finger nuclease (ZFN) pair, Transcription Activator-Like Effector (TALE) protein or Transcription Activator-Like Effector Nuclease (TALEN), or Clustered Regularly Interspersed Short Palindromic Repeats (CRISPR)/CRISPR-associated (Cas) systems. The length of the recognition sequence can vary, and includes, for example, recognition sequences that are about 30-36 bp for a zinc finger protein or ZFN pair, about 15-18 bp for each ZFN, about 36 bp for a TALE protein or TALEN, and about 20 bp for a CRISPR/Cas guide RNA.

[0051] In some embodiments, CRISPR/Cas systems can be used to modify a COLGALT2 genomic nucleic acid molecule within a cell. The methods and compositions disclosed herein can employ CRISPR-Cas systems by utilizing CRISPR complexes (comprising a guide RNA (gRNA) complexed with a Cas protein) for site-directed cleavage of COLGALT2 nucleic acid molecules.

[0052] Cas proteins generally comprise at least one RNA recognition or binding domain that can interact with gRNAs. Cas proteins can also comprise nuclease domains (such as, for example, DNase or RNase domains), DNA binding domains, helicase domains, protein-protein interaction domains, dimerization domains, and other domains. Suitable Cas proteins include, for example, a wild type Cas9 protein and a wild type Cpf1 protein (such as, for example, FnCpf1). A Cas protein can have full cleavage activity to create a double-strand break in a COLGALT2 genomic nucleic acid molecule or it can be a nickase that creates a single-strand break in a COLGALT2 genomic nucleic acid molecule. Additional examples of Cas proteins include, but are not limited to, Cas1, Cas1B, Cas2, Cas3, Cas4, Cas5, Cas5e (CasD), Cas6, Cas6e, Cas6f, Cas7, Cas8a1, Cas8a2, Cas8b, Cas8c, Cas9 (Csn1 or Csx12), Cas10, Cas10d, CasF, CasG, CasH, Csy1, Csy2, Csy3, Cse1 (CasA), Cse2 (CasB), Cse3 (CasE), Cse4 (CasC), Csc1, Csc2, Csa5, Csn2, Csm2, Csm3, Csm4, Csm5, Csm6, Cmr1, Cmr3, Cmr4, Cmr5, Cmr6, Csb1, Csb2, Csb3, Csx17, Csx14, Csx10, Csx16, CsaX, Csx3, Csx1, Csx15, Csf1, Csf2, Csf3, Csf4, and Cu1966, and homologs or modified versions thereof. In some embodiments, a Cas system, such as Cas12a, can have multiple gRNAs encoded into a single crRNA. Cas proteins can also be operably linked to heterologous polypeptides as fusion proteins. For example, a Cas protein can be fused to a cleavage domain, an epigenetic modification domain, a transcriptional activation domain, or a transcriptional repressor domain. Cas proteins can be provided in any form. For example, a Cas protein can be provided in the form of a protein, such as a Cas protein complexed with a gRNA. Alternately, a Cas protein can be provided in the form of a nucleic acid molecule encoding the Cas protein, such as an RNA or DNA.

[0053] In some embodiments, targeted genetic modifications of COLGALT2 genomic nucleic acid molecules can be generated by contacting a cell with a Cas protein and one or more gRNAs that hybridize to one or more gRNA recognition sequences within a target genomic locus in the COLGALT2 genomic nucleic acid molecule. The gRNA recognition sequence can include or be proximate to the start codon of a COLGALT2 genomic nucleic acid molecule or the stop codon of a COLGALT2 genomic nucleic acid molecule. For example, the gRNA recognition sequence can be located from about 10, from about 20, from about 30, from about 40, from about 50, from about 100, from about 200, from about 300, from about 400, from about 500, or from about 1,000 nucleotides of the start codon or the stop codon.

[0054] The gRNA recognition sequences within a target genomic locus in a COLGALT2 genomic nucleic acid molecule are located near a Protospacer Adjacent Motif (PAM) sequence, which is a 2-6 base pair DNA sequence immediately following the DNA sequence targeted by the Cas9 nuclease. The canonical PAM is the sequence 5′-NGG-3′ where “N” is any nucleobase followed by two guanine (“G”) nucleobases. gRNAs can transport Cas9 to anywhere in the genome for gene editing, but no editing can occur at any site other than one at which Cas9 recognizes PAM. In addition, 5′-NGA-3′ can be a highly efficient non-canonical PAM for human cells. Generally, the PAM is about 2-6 nucleotides downstream of the DNA sequence targeted by the gRNA. The PAM can flank the gRNA recognition sequence. In some embodiments, the gRNA recognition sequence can be flanked on the 3′ end by the PAM. In some embodiments, the gRNA recognition sequence can be flanked on the 5′ end by the PAM. For example, the cleavage site of Cas proteins can be about 1 to about 10, about 2 to about 5 base pairs, or three base pairs upstream or downstream of the PAM sequence. In some embodiments (such as when Cas9 from S. pyogenes or a closely related Cas9 is used), the PAM sequence of the non-complementary strand can be 5′-NGG-31, where Nis any DNA nucleotide and is immediately 3′ of the gRNA recognition sequence of the non-complementary strand of the target DNA. As such, the PAM sequence of the complementary strand would be 5′-CCN-31, where N is any DNA nucleotide and is immediately 5′ of the gRNA recognition sequence of the complementary strand of the target DNA.

[0055] A gRNA is an RNA molecule that binds to a Cas protein and targets the Cas protein to a specific location within a COLGALT2 genomic nucleic acid molecule. An exemplary gRNA is a gRNA effective to direct a Cas enzyme to bind to or cleave a COLGALT2 genomic nucleic acid molecule, wherein the gRNA comprises a DNA-targeting segment that hybridizes to a gRNA recognition sequence within the COLGALT2 genomic nucleic acid molecule. Exemplary gRNAs comprise a DNA-targeting segment that hybridizes to a gRNA recognition sequence present within a COLGALT2 genomic nucleic acid molecule that includes or is proximate to the start codon or the stop codon. For example, a gRNA can be selected such that it hybridizes to a gRNA recognition sequence that is located from about 5, from about 10, from about 15, from about 20, from about 25, from about 30, from about 35, from about 40, from about 45, from about 50, from about 100, from about 200, from about 300, from about 400, from about 500, or from about 1,000 nucleotides of the start codon or located from about 5, from about 10, from about 15, from about 20, from about 25, from about 30, from about 35, from about 40, from about 45, from about 50, from about 100, from about 200, from about 300, from about 400, from about 500, or from about 1,000 nucleotides of the stop codon. Suitable gRNAs can comprise from about 17 to about 25 nucleotides, from about 17 to about 23 nucleotides, from about 18 to about 22 nucleotides, or from about 19 to about 21 nucleotides. In some embodiments, the gRNAs can comprise 20 nucleotides.

[0056] The Cas protein and the gRNA form a complex, and the Cas protein cleaves the COLGALT2 genomic nucleic acid molecule. The Cas protein can cleave the nucleic acid molecule at a site within or outside of the nucleic acid sequence present in the COLGALT2 genomic nucleic acid molecule to which the DNA-targeting segment of a gRNA will bind. For example, formation of a CRISPR complex (comprising a gRNA hybridized to a gRNA recognition sequence and complexed with a Cas protein) can result in cleavage of one or both strands in or near (such as, for example, within 1, 2, 3, 4, 5, 6, 7, 8, 9, 10, 20, 50, or more base pairs from) the nucleic acid sequence present in the COLGALT2 genomic nucleic acid molecule to which a DNA-targeting segment of a gRNA will bind.

[0057] Such methods can result, for example, in a COLGALT2 genomic nucleic acid molecule in which a region of the COLGALT2 genomic nucleic acid molecule is disrupted, the start codon is disrupted, the stop codon is disrupted, or the coding sequence is disrupted or deleted. Optionally, the cell can be further contacted with one or more additional gRNAs that hybridize to additional gRNA recognition sequences within the target genomic locus in the COLGALT2 genomic nucleic acid molecule. By contacting the cell with one or more additional gRNAs (such as, for example, a second gRNA that hybridizes to a second gRNA recognition sequence), cleavage by the Cas protein can create two or more double-strand breaks or two or more single-strand breaks.

[0058] In any of the methods of treatment or prevention described herein, the subject being treated may comprise a COLGALT2 variant nucleic acid molecule. In some embodiments, the subject being treated is heterozygous for the COLGALT2 variant nucleic acid molecule. In some embodiments, the subject being treated is homozygous for the COLGALT2 variant nucleic acid molecule. In some embodiments, the subject being treated is COLGALT2 reference. The COLGALT2 variant nucleic acid molecule can be any of the COLGALT2 variant nucleic acid molecules disclosed herein. In some embodiments, the COLGALT2 variant nucleic acid molecule is a COLGALT2 variant genomic nucleic acid molecule that comprises any one or more of the genetic variations in the genomic nucleic acid molecule (referring to the chromosome: positions set forth in the GRCh38/hg38 human genome assembly) set forth in Table 4, or an mRNA molecule produced therefrom, or a cDNA molecule produced from the mRNA molecule.

[0059] In some embodiments, the methods of treatment or prevention further comprise detecting the presence or absence of a COLGALT2 variant nucleic acid molecule in a biological sample from the subject. In some embodiments, the COLGALT2 variant nucleic acid molecule can be any of the COLGALT2 variant nucleic acid molecules disclosed herein. In some embodiments, the COLGALT2 variant nucleic acid molecule is a COLGALT2 variant genomic nucleic acid molecule that comprises any one or more of the genetic variations in the genomic nucleic acid molecule (referring to the chromosome: positions set forth in the GRCh38/hg38 human genome assembly) set forth in Table 4, or an mRNA molecule produced therefrom, or a cDNA molecule produced from the mRNA molecule.

[0060] The present disclosure also provides methods of treating a subject with an OA therapeutic agent or OA therapy that treats or inhibits OA, wherein the subject has OA or is at risk of developing OA. The methods comprise determining whether the subject has a COLGALT2 variant nucleic acid molecule by obtaining or having obtained a biological sample from the subject, and performing or having performed a sequence analysis on the biological sample to determine if the subject has a genotype comprising the COLGALT2 variant nucleic acid molecule. In embodiments where the subject is COLGALT2 reference, the methods further comprise administering or continuing to administer the OA therapeutic agent in an amount that is the same as or less than a standard dosage amount or OA therapy to the subject, and/or administering a COLGALT2 inhibitor to the subject. In embodiments where the subject is heterozygous for the COLGALT2 variant nucleic acid molecule, the methods further comprise administering or continuing to administer the OA therapeutic agent in an amount that is the same as or less than a standard dosage amount or OA therapy to the subject, and/or administering a COLGALT2 inhibitor to the subject. In embodiments where the subject is homozygous for the COLGALT2 variant nucleic acid molecule, the methods further comprise administering or continuing to administer the OA therapeutic agent in a standard dosage amount or OA therapy to the subject. The presence of a COLGALT2 variant nucleic acid molecule indicates the subject has a decreased risk of developing OA. In some embodiments, the subject is COLGALT2 reference. In some embodiments, the subject is heterozygous for a COLGALT2 variant nucleic acid molecule. In some embodiments, the subject is homozygous for a COLGALT2 variant nucleic acid molecule. In any of the embodiments described herein, the COLGALT2 inhibitor is an example of an OA therapeutic agent. In some embodiments, the COLGALT2 variant nucleic acid molecule is a COLGALT2 variant genomic nucleic acid molecule that comprises any one or more of the genetic variations in the genomic nucleic acid molecule (referring to the chromosome: positions set forth in the GRCh38/hg38 human genome assembly) set forth in Table 4, or an mRNA molecule produced therefrom, or a cDNA molecule produced from the mRNA molecule.

[0061] For subjects that are genotyped or determined to be either COLGALT2 reference or heterozygous for a COLGALT2 variant nucleic acid molecule, such subjects can be administered a COLGALT2 inhibitor, as described herein.

[0062] Detecting the presence or absence of a COLGALT2 variant nucleic acid molecule in a biological sample from a subject and/or determining whether a subject has a COLGALT2 variant nucleic acid molecule can be carried out by any of the methods described herein. In some embodiments, these methods can be carried out in vitro. In some embodiments, these methods can be carried out in situ. In some embodiments, these methods can be carried out in vivo. In any of these embodiments, the nucleic acid molecule can be present within a cell obtained from the subject.

[0063] In some embodiments, when the subject is COLGALT2 reference, the subject is administered an OA therapeutic agent in an amount that is the same as or less than a standard dosage amount or OA therapy, and/or a COLGALT2 inhibitor. In some embodiments, when the subject is heterozygous for a COLGALT2 variant nucleic acid molecule, the subject is administered an OA therapeutic agent in an amount that is the same as or less than a standard dosage amount or OA therapy, and/or a COLGALT2 inhibitor.

[0064] In some embodiments, the treatment or prevention methods comprise detecting the presence or absence of a decrease in the expression of a COLGALT2 variant mRNA or polypeptide in a biological sample from the subject. In some embodiments, when the subject does not have a decrease in the expression of a COLGALT2 variant mRNA or polypeptide, the subject is administered an OA therapeutic agent in an amount that is the same as or less than a standard dosage amount or OA therapy, and/or a COLGALT2 inhibitor. In some embodiments, when the subject has a decrease in the expression of a COLGALT2 variant mRNA or polypeptide, the subject is administered an OA therapeutic agent in a standard dosage amount or OA therapy.

[0065] The present disclosure also provides methods of treating a subject with an OA therapeutic agent or OA therapy that treats or inhibits OA, wherein the subject has OA or is at risk of developing OA. The methods comprise determining whether the subject has a decrease in the expression of a COLGALT2 variant mRNA or polypeptide by obtaining or having obtained a biological sample from the subject, and performing or having performed an assay on the biological sample to determine if the subject has a decrease in the expression of a COLGALT2 variant mRNA or polypeptide. In embodiments where the subject does not have a decrease in the expression of a COLGALT2 variant mRNA or polypeptide, the methods further comprise administering or continuing to administer the OA therapeutic agent in an amount that is the same as or less than a standard dosage amount or OA therapy to the subject, and/or administering a COLGALT2 inhibitor to the subject. In embodiments where the subject has a decrease in the expression of a COLGALT2 variant mRNA or polypeptide, the methods further comprise administering or continuing to administer the OA therapeutic agent in a standard dosage amount or OA therapy to the subject. The presence of a decrease in the expression of a COLGALT2 variant mRNA or polypeptide indicates the subject has a decreased risk of developing OA. In some embodiments, the subject has a decrease in the expression of a COLGALT2 variant mRNA or polypeptide. In some embodiments, the subject does not have a decrease in the expression of a COLGALT2 variant mRNA or polypeptide. In any of the embodiments described herein, the COLGALT2 inhibitor is an example of an OA therapeutic agent. In some embodiments, the COLGALT2 variant nucleic acid molecule is a COLGALT2 variant genomic nucleic acid molecule that comprises any one or more of the genetic variations in the genomic nucleic acid molecule (referring to the chromosome: positions set forth in the GRCh38/hg38 human genome assembly) set forth in Table 4, or an mRNA molecule produced therefrom, or a cDNA molecule produced from the mRNA molecule.

[0066] Detecting a decrease in the expression of a COLGALT2 variant mRNA or polypeptide can be carried out by a variety of known methods. In some embodiments, these methods can be carried out in vitro. In some embodiments, these methods can be carried out in situ. In some embodiments, these methods can be carried out in vivo. In any of these embodiments, the mRNA or polypeptide can be present within a cell obtained from the subject.

[0067] In some embodiments, the treatment or prevention methods comprise detecting the presence or absence of a COLGALT2 variant polypeptide in a biological sample from the subject. In some embodiments, when the subject does not have a COLGALT2 variant polypeptide, the subject is administered an OA therapeutic agent in an amount that is the same as or less than a standard dosage amount or OA therapy, and/or a COLGALT2 inhibitor. In some embodiments, when the subject has a COLGALT2 variant polypeptide, the subject is administered an OA therapeutic agent in standard dosage amount or OA therapy.

[0068] The present disclosure also provides methods of treating a subject with an OA therapeutic agent or OA therapy that treats or inhibits OA, wherein the subject has OA or is at risk of developing OA. The methods comprise determining whether the subject has a COLGALT2 variant polypeptide by obtaining or having obtained a biological sample from the subject and performing or having performed an assay on the biological sample to determine if the subject has a COLGALT2 variant polypeptide. When the subject does not have a COLGALT2 variant polypeptide, the subject is administered the OA therapeutic agent in an amount that is the same as or less than a standard dosage amount or OA therapy, and/or a COLGALT2 inhibitor. When the subject has a COLGALT2 variant polypeptide, the subject is administered the OA therapeutic agent in a standard dosage amount or OA therapy. The presence of a COLGALT2 variant polypeptide indicates the subject has a decreased risk of developing OA. In some embodiments, the subject has a COLGALT2 variant polypeptide. In some embodiments, the subject does not have a COLGALT2 variant polypeptide.

[0069] The present disclosure also provides methods of preventing a subject from developing OA by administering an OA therapeutic agent or OA therapy that prevents OA. In some embodiments, the method comprises determining whether the subject has a COLGALT2 variant polypeptide by obtaining or having obtained a biological sample from the subject and performing or having performed an assay on the biological sample to determine if the subject has a COLGALT2 variant polypeptide. When the subject does not have a COLGALT2 variant polypeptide, the subject is administered the OA therapeutic agent in an amount that is the same as or less than a standard dosage amount or OA therapy, and/or a COLGALT2 inhibitor. When the subject has a COLGALT2 variant polypeptide, the subject is administered the OA therapeutic agent in a standard dosage amount or OA therapy. The presence of a COLGALT2 variant polypeptide indicates the subject has a decreased risk of developing OA. In some embodiments, the subject has a COLGALT2 variant polypeptide. In some embodiments, the subject does not have a COLGALT2 variant polypeptide.

[0070] Detecting the presence or absence of a COLGALT2 variant polypeptide in a biological sample from a subject and/or determining whether a subject has a COLGALT2 variant polypeptide can be carried out by any of the methods described herein. In some embodiments, these methods can be carried out in vitro. In some embodiments, these methods can be carried out in situ. In some embodiments, these methods can be carried out in vivo. In any of these embodiments, the polypeptide can be present within a cell obtained from the subject.

[0071] In some embodiments, the COLGALT2 inhibitor is a small molecule. In some embodiments, the small molecule is low molecular weight (<900 daltons) organic compound.

[0072] In some embodiments, the COLGALT2 inhibitor comprises an antibody, or antigen-binding fragment thereof. In some embodiments, the antibody, or antigen-binding fragment thereof, binds specifically to human COLGALT2. In some embodiments, the antibody is a fully human monoclonal antibody (mAb), or antigen-binding fragment thereof, that specifically binds and neutralizes, inhibits, blocks, abrogates, reduces, or interferes with, at least one activity of COLGALT2, in particular, human COLGALT2. In some embodiments, an antibody or fragment thereof can neutralize, inhibit, block, abrogate, reduce, or interfere with, an activity of COLGALT2 by binding to an epitope of COLGALT2 that is directly involved in the targeted activity of COLGALT2. In some embodiments, an antibody or fragment thereof can neutralize, inhibit, block, abrogate, reduce, or interfere with, an activity of COLGALT2 by binding to an epitope of COLGALT2 that is not directly involved in the targeted activity of COLGALT2, but the antibody or fragment binding thereto sterically or conformationally inhibits, blocks, abrogates, reduces, or interferes with, the targeted activity of COLGALT2. In some embodiments, an antibody or fragment thereof binds to an epitope of COLGALT2 that is not directly involved in the targeted activity of COLGALT2 (i.e., a non-blocking antibody), but the antibody or fragment binding thereto results in the enhancement of the clearance of COLGALT2 from the circulation, compared to the clearance of COLGALT2 in the absence of the antibody or fragment thereof, thereby indirectly inhibiting, blocking, abrogating, reducing, or interfering with, an activity of COLGALT2. Clearance of COLGALT2 from the circulation can be particularly enhanced by combining two or more different non-blocking antibodies that do not compete with one another for specific binding to COLGALT2. The antibodies can be full-length (for example, an IgG1 or IgG4 antibody) or may comprise only an antigen-binding portion (for example, a Fab, F (ab′)₂ or scFv fragment), and may be modified to affect functionality, e.g., to eliminate residual effector functions (Reddy et al., J. Immunol., 2000, 164, 1925-1933).

[0073] In some embodiments, the antibody or antigen-binding fragment thereof specifically binds to COLGALT2 with an equilibrium dissociation constant (K_{D}) of about 7 nM or less, about 6 nM or less, about 5 nM or less, about 4 nM or less, about 3 nM or less, about 2 nM or less, or about 1 nM or less, as measured by surface plasmon resonance assay (for example, BIACORE™). In some embodiments, the antibody exhibits a K_{D} of about 800 pM or less, about 700 pM or less; about 600 pM or less; about 500 pM or less; about 400 pM or less; about 300 pM or less; about 200 pM or less; about 100 pM or less; or about 50 pM or less.

[0074] In some embodiments, the anti-COLGALT2 antibodies have a modified glycosylation pattern. In some applications, modification to remove undesirable glycosylation sites may be useful, or e.g., removal of a fucose moiety to increase antibody dependent cellular cytotoxicity (ADCC) function (see, Shield et al., J. Biol. Chem., 2002, 277, 26733). In other applications, removal of N-glycosylation site may reduce undesirable immune reactions against the therapeutic antibodies or increase affinities of the antibodies. In yet other applications, modification of galactosylation can be made in order to modify complement dependent cytotoxicity (CDC).

[0075] In some embodiments, the anti-COLGALT2 antibodies can comprise the complementarity determining regions (CDRs) of commercially available antibodies such as, for example, COLGALT2 Rabbit pAb (catalog #A15407, Universal Biologicals), COLGALT2 polyclonal antibody (catalog #PIPA5109571, Fisher Scientific), and COLGALT2 polyclonal antibody (catalog #PA5-56845, ThermoFisher Scientific).

[0076] Antigen-binding fragments include, but are not limited to, a monovalent Fab′, a divalent Fab2, a F (ab)′3 fragment, a single-chain fragment variable (scFv), a bis-scFv, a (scFv) 2, a diabody, a minibody, a nanobody, a triabody, a tetrabody, a disulfide stabilized Fv protein (dsFv), a single-domain antibody (sdAb), an Ig NAR, a bispecific antibody or binding fragment thereof, a bi-specific T-cell engager (BiTE), a trispecific antibody, and chemically modified derivatives thereof.

[0077] The present disclosure also provides compositions comprising a combination of an antibody or antigen-binding fragment thereof and an OA therapeutic agent.

[0078] In some embodiments, the OA therapeutic agents include, but are not limited to, medications (such as, for example, acetaminophen, a nonsteroidal anti-inflammatory drug (NSAID) (such as, for example, ibuprofen and naproxen sodium), duloxetine, a corticosteroid (such as, for example, cortisone)), a lubricator (such as, for example, hyaluronic acid), and an analgesic, such as an opioid, or any combination thereof. In some embodiments, the OA therapeutic agent comprises acetaminophen. In some embodiments, the OA therapeutic agent comprises a nonsteroidal anti-inflammatory drug (NSAID). In some embodiments, the NSAID comprises ibuprofen. In some embodiments, the NSAID comprises naproxen sodium. In some embodiments, the OA therapeutic agent comprises duloxetine. In some embodiments, the OA therapeutic agent comprises a corticosteroid. In some embodiments, the corticosteroid comprises cortisone. In some embodiments, the OA therapeutic agent comprises a lubricator. In some embodiments, the lubricator comprises hyaluronic acid. In some embodiments, the OA therapeutic agent comprises an analgesic. In some embodiments, the alagesic comprises an opioid. In some embodiments, the OA therapeutic agent comprises a Nerve Growth Factor (NGF) inhibitor. In some embodiments, the OA therapeutic agent comprises fasinumab.

[0079] In some embodiments, the OA therapeutic agents include, but are not limited to, anabolic cartilage therapeutic agents. Exemplary anabolic cartilage therapeutic agents include, but are not limited to, recombinant human FGF18 (Sprifermin) and TGF-beta 1 (a cell therapy called TissueGene-C).

[0080] In some embodiments, the OA therapy comprises any therapy used to reduce or manage OA. In some embodiments, the OA therapy comprises physical therapy, occupational therapy, transcutaneous electrical nerve stimulation (TENS), or surgical and other procedures (such as, for example, knee osteotomy, joint replacement, and bone realignment), or any combination thereof. These treatment therapies may be delayed or avoided altogether by treatment with a COLGALT2 inhibitor as described herein.

[0081] In some embodiments, the OA therapy comprises a cartilage repair technique such as, for example, an autologous chondrocyte transplant. In some embodiments, chondrocytes can be obtained from a particular subject to be treated. These obtained chondrocytes cultured with a COLGALT2 inhibitor and reimplanted into the subject. In some embodiments, the cultured chondrocytes can be reimplanted embedded on a matrix on a cartilage defect in the subject. In some embodiments, the reimplanted chondrocytes are chondrocyte stem cells. In some embodiments, the reimplanted chondrocytes have been genetically modified, such as by CRISPR techniques, to contain a COLGALT2 gene that comprises any one or more of the genetic variations in the genomic nucleic acid molecule (referring to the chromosome: positions set forth in the GRCh38/hg38 human genome assembly) set forth in Table 4 (heterozygous or homozygous). In such cases, the reimplanted chondrocytes need not be cultured with a COLGALT2 inhibitor prior to reimplantation into the subject.

[0082] In some embodiments, the OA therapeutic agent or OA therapy can be combined with a COLGALT2 inhibitor.

[0083] In some embodiments, the dose of the OA therapeutic agents that treat, prevent, or inhibit OA can be decreased by about 10%, by about 20%, by about 30%, by about 40%, by about 50%, by about 60%, by about 70%, by about 80%, or by about 90% for subjects that are heterozygous for a COLGALT2 variant nucleic acid molecule or COLGALT2 reference (i.e., a less than the standard dosage amount) compared to subjects that are homozygous for a COLGALT2 variant nucleic acid molecule (who may receive a standard dosage amount). In some embodiments, the dose of the OA therapeutic agents that treat, prevent, or inhibit OA can be decreased by about 10%, by about 20%, by about 30%, by about 40%, or by about 50%. In some embodiments, the dose of the OA therapeutic agents that treat, prevent, or inhibit OA can be decreased by about 10%, by about 20%, by about 30%, by about 40%, by about 50%, by about 60%, by about 70%, by about 80%, or by about 90% for subjects that are heterozygous for a COLGALT2 variant nucleic acid molecule or COLGALT2 reference compared to subjects that are COLGALT2 reference. In addition, subjects that are heterozygous for a COLGALT2 variant nucleic acid molecule or COLGALT2 reference can be administered the OA therapeutic agents less frequently compared to subjects that are heterozygous for the COLGALT2 variant nucleic acid molecule.

[0084] Administration of the OA therapeutic agents that treat, prevent, or inhibit OA and/or COLGALT2 inhibitors can be repeated, for example, after one day, two days, three days, five days, one week, two weeks, three weeks, one month, five weeks, six weeks, seven weeks, eight weeks, two months, or three months. The repeated administration can be at the same dose or at a different dose. The administration can be repeated once, twice, three times, four times, five times, six times, seven times, eight times, nine times, ten times, or more. For example, according to certain dosage regimens a subject can receive therapy for a prolonged period of time such as, for example, 6 months, 1 year, or more.

[0085] Administration of the OA therapeutic agents and/or COLGALT2 inhibitors can occur by any suitable route including, but not limited to, intraarticular, parenteral, intravenous, oral, subcutaneous, intra-arterial, intracranial, intrathecal, intraperitoneal, topical, intranasal, or intramuscular. Pharmaceutical compositions for administration are desirably sterile and substantially isotonic and manufactured under GMP conditions. Pharmaceutical compositions can be provided in unit dosage form (i.e., the dosage for a single administration). Pharmaceutical compositions can be formulated using one or more physiologically and pharmaceutically acceptable carriers, diluents, excipients, or auxiliaries. The formulation depends on the route of administration chosen. The term “pharmaceutically acceptable” means that the carrier, diluent, excipient, or auxiliary is compatible with the other ingredients of the formulation and not substantially deleterious to the recipient thereof.

[0086] The terms “treat”, “treating”, and “treatment” and “prevent”, “preventing”, and “prevention” as used herein, refer to eliciting the desired biological response, such as a therapeutic and prophylactic effect, respectively. In some embodiments, a therapeutic effect comprises one or more of a decrease/reduction in OA, a decrease/reduction in the severity of OA (such as, for example, a reduction or inhibition of development of OA), a decrease/reduction in symptoms and disease-related effects, delaying the onset of symptoms and disease-related effects, reducing the severity of symptoms of disease-related effects, reducing the number of symptoms and disease-related effects, reducing the latency of symptoms and disease-related effects, an amelioration of symptoms and disease-related effects, reducing secondary symptoms, reducing secondary infections, preventing relapse to OA, decreasing the number or frequency of relapse episodes, increasing latency between symptomatic episodes, increasing time to sustained progression, speeding recovery, or increasing efficacy of or decreasing resistance to alternative therapeutics, and/or an increased survival time of the affected host animal, following administration of the agent or composition comprising the agent. A prophylactic effect may comprise a complete or partial avoidance/inhibition or a delay of OA development/progression (such as, for example, a complete or partial avoidance/inhibition or a delay), and an increased survival time of the affected host animal, following administration of a therapeutic protocol. Treatment of OA encompasses the treatment of a subject already diagnosed as having any form of OA at any clinical stage or manifestation, the delay of the onset or evolution or aggravation or deterioration of the symptoms or signs of OA, and/or preventing and/or reducing the severity of OA.

[0087] In some embodiments, the COLGALT2 inhibitor and the OA therapeutic agent are disposed within a pharmaceutical composition. In some embodiments, the COLGALT2 inhibitor is disposed within a first pharmaceutical composition and the OA therapeutic agent is disposed within a second pharmaceutical composition. In some embodiments, the first pharmaceutical composition and the second pharmaceutical composition are administered simultaneously. In some embodiments, the first pharmaceutical composition is administered before the second pharmaceutical composition. In some embodiments, the first pharmaceutical composition is administered after the second pharmaceutical composition.

[0088] In any of the embodiments described herein, the presence and severity of OA can be assessed by imaging. In some embodiments, the present state of OA in a subject can be assessed by imaging. In some embodiments, the progression of OA in a subject can be assessed by imaging. In some embodiments, the lack of progression of OA in a subject can be assessed by imaging. In some embodiments, the efficacy of a therapeutic treatment of OA can be monitored by imaging.

[0089] In any of the embodiments described herein, the imaging can be any medical imaging. The medical imaging modality includes, but is not limited to, weight-bearing X-ray, dual X-ray absorptiometry (DXA), magnetic resonance imaging (MRI), computerized tomography (CT), or positron emission tomography (PET). The image sites include, but are not limited to, knees, hips, hands, spine, and shoulder.

[0090] In some embodiments, images are obtained by measuring the absorption of X-ray radiation (weight-bearing X-ray, DXA, or CT), capturing localized measures of bone mineral density. In such embodiments, a 2-dimensional (2D) projection or 3D reconstruction allows quantification of bone structure and integrity that can be used as a biomarker for the assessment of OA. Several methods can be used to derive biomarkers from the images, including, but not limited to, segmentation of articulating bones to measure the JSW (e.g., the femur and the tibia), direct measurement of JSW on the images using an electronic caliper, or assessment of the severity of disease by an experienced reader using validated clinical scores, or quantification of the trabecular, subchondral and cortical bone regions.

[0091] In some embodiments, images are obtained based on the principle of resonant excitation of the tissue magnetization induced by an external magnetic field. The image is obtained by encoding the spatial position into the precession frequency of the magnetization using magnetic field gradients. Images obtained in such a manner provide excellent soft tissue contrast and allow assessment of all connective tissue components in the joint. Biomarkers can be extracted from the images by different methods, including but not limited to changing the contrast of the image according to a specified scheme to derive quantitative measures (e.g., measurement of T2 relaxation time measured by acquisitions with different echo times), or using a contrast agent to enhance or quantify a process (e.g., contrast-enhanced MRI with Gd contrast agent for inflammation), or by quantifying the anatomy of the joint from the images (e.g., measuring the cartilage thickness).

[0092] In some embodiments, a radioactive contrast agent is used to track where this agent accumulates in the body. This contrast agent has a component with molecular specificity for binding/uptake and a radioactive element for which the by-product produces a particle that can be detected directly or indirectly (e.g., PET). Images acquired using this principle provide many biomarkers, including but not limited to, the standardized uptake value, the tissue volume, or parameters from a pharmacokinetic model fitted to the measured signal.

[0093] In any of the methods described herein, the measurements derived from the images can be used as a marker of the presence of OA, severity of OA, prediction of progression (or lack thereof) of OA, or assessment of therapy efficacy. For example, a subject who is suspected of having or developing OA may obtain from the affected joint an initial image (such as an X-ray) and a follow-up image or series of images with the same modality. At each timepoint, the same imaging marker will be calculated using the same methods to assess changes. X-ray imaging of affected joints can be performed with additional imaging as desired. In some embodiments, sensitive definitions and prospective imaging are used. In some embodiments, MRI is frequently used at baseline and for adjudication which is superior to conventional radiography at detecting joint pathology. For example, a reduction in the JSW in the affected joint over time will indicate that the OA is progressing in that joint. A subject may desire to be treated, such as by any of the methods described herein. Any of the herein-described imaging methods can monitor the efficacy of treatment to determine the efficacy of the treatment.

[0094] In some embodiments, patients treated with a specific therapeutic agent show an average change in an imaging marker (e.g., an increase in JSW) that is significantly different from the average change in patients treated with placebo, which can be interpreted as a positive measure of improvement. Such change would be interpreted as a positive efficacy of the therapy.

[0095] In some embodiments, the subject can have rapidly progressive osteoarthritis type 1 (RPOA-1) (e.g., joint space narrowing), rapidly progressive osteoarthritis type 2 (RPOA-2) (e.g., limited/partial joint collapse; bone damage), primary osteonecrosis (e.g., avascular necrosis), subchondral insufficiency fracture (SIF), or destructive arthropathy (DA) (e.g., complete joint collapse). In some embodiments, the subject has RPOA-1. In some embodiments, the subject has RPOA-2. In some embodiments, the subject has primary osteonecrosis. In some embodiments, the subject has SIF. In some embodiments, the subject has DA.

[0096] In some embodiments, RPOA-1 can be characterized as a rapid loss of joint space width from baseline without evidence of bone fragmentation or destruction. If rapid loss of JSW from baseline is observed by X-ray, an MRI can be obtained and substantial focal or diffuse loss of hyaline/articular cartilage from baseline consistent with RPOA 1 can be observed. A rapid change in joint space width from baseline is defined as: a) knee joints: if JSW is ≥2 mm at baseline, a decrease of ≥2 mm or 50% from baseline JSW at any point during the study (whichever is greater); and if JSW is <2 mm at baseline or where accurate JSW measurement is not possible, a change in JSW to 0 mm; b) hip joints: if JSW is ≥1.5 mm at baseline, a decrease of >1.5 mm from baseline; and if JSW is <1.5 mm at baseline or where accurate JSW measurement is not possible, a change in JSW to 0 mm. If a prior image of the same joint is not available for comparison, by definition, RPOA Type 1 cannot be determined.

[0097] In some embodiments, RPOA-2 can be characterized as abnormal bone fragmentation or destruction over a short period of time, including limited collapse of at least one articular surface, and are observed principally by MRI but may be detected by X-rays.

[0098] In some embodiments, primary osteonecrosis can be characterized as focal circumscribed or extended region of mottled radiolucency and sclerosis (infarcted bone) which is confirmed by MRI. No evidence of subchondral collapse or bone fragmentation preceding or concurrent with the diagnosis of primary osteonecrosis.

[0099] In some embodiments, SIF can be characterized as subchondral radiolucency, which may have a sclerotic linear component and articular surface flattening and is confirmed by MRI. SIF does not include significant collapse or fragmentation.

[0100] In some embodiments, DA can be characterized as abnormal bone fragmentation, destruction or fracture over a short period of time, including near-total collapse of an articular surface, and often associated with subluxation or malalignment, all of which are features inconsistent with radiographic findings typically observed in conventional advanced OA, and are readily observed by x-rays.

[0101] In some embodiments, when a subject has DA, particular parameters of treatment can be tailored. For example, a) treatment can be restricted to patient populations that are refractory to or unable to tolerate acetaminophen, NSAIDs, and opioids; b) patients with co-morbidities that may result in an increased risk for destructive arthropathy can be excluded; c) concomitant use of NSAIDs can be restricted; and/or d) can include robust radiologic monitoring by: i) excluding patients with a history of RPOA, ON, SIF or other joint arthropathies that would place patients at risk of joint destruction; ii) schedule radiographic surveillance; iii) timely evaluation (clinical assessment/X-rays/MRI) of any reports of worsening pain in any joint; and iv) consider RPOA/SIF/ON as AESI and study drug to be discontinued.

[0102] The present disclosure also provides methods of identifying a subject having an increased risk of developing OA. In some embodiments, the method comprises determining or having determined in a biological sample obtained from the subject the presence or absence of a COLGALT2 variant nucleic acid molecule (such as a genomic nucleic acid molecule, mRNA molecule, and/or cDNA molecule). When the subject lacks a COLGALT2 variant nucleic acid molecule (i.e., the subject is genotypically categorized as COLGALT2 reference), then the subject has an increased risk of developing OA. When the subject has a COLGALT2 variant nucleic acid molecule that may induce loss-of-function in some manner (i.e., the subject is heterozygous or homozygous for a COLGALT2 variant nucleic acid molecule), then the subject has a decreased risk of developing OA. In some embodiments, the COLGALT2 variant nucleic acid molecule is a COLGALT2 variant genomic nucleic acid molecule that comprises any one or more of the genetic variations in the genomic nucleic acid molecule (referring to the chromosome: positions set forth in the GRCh38/hg38 human genome assembly) set forth in Table 4, or an mRNA molecule produced therefrom, or a cDNA molecule produced from the mRNA molecule.

[0103] Having a single copy of a COLGALT2 variant nucleic acid molecule is more protective of a subject from developing OA than having no copies of a COLGALT2 variant nucleic acid molecule. Without intending to be limited to any particular theory or mechanism of action, it is believed that a single copy of a COLGALT2 variant nucleic acid molecule (i.e., heterozygous for a COLGALT2 variant nucleic acid molecule) is protective of a subject from developing OA and it is also believed that having two copies of a COLGALT2 variant nucleic acid molecule (i.e., homozygous for a COLGALT2 variant nucleic acid molecule) may be more protective of a subject from developing OA, relative to a subject with a single copy. Thus, in some embodiments, a single copy of a COLGALT2 variant nucleic acid molecule may not be completely protective, but instead, may be partially or incompletely protective of a subject from developing OA. While not desiring to be bound by any particular theory, there may be additional factors or molecules involved in the development of OA that are still present in a subject having a single copy of a COLGALT2 variant nucleic acid molecule, thus resulting in less than complete protection from the development of OA.

[0104] Determining whether a subject has a COLGALT2 variant nucleic acid molecule in a biological sample from a subject and/or determining whether a subject has a COLGALT2 variant nucleic acid molecule can be carried out by any of the methods described herein. In some embodiments, these methods can be carried out in vitro. In some embodiments, these methods can be carried out in situ. In some embodiments, these methods can be carried out in vivo. In any of these embodiments, the nucleic acid molecule can be present within a cell obtained from the subject.

[0105] In some embodiments, when a subject is identified as having an increased risk of developing OA, the subject is administered an OA therapeutic agent or OA therapy, and/or a COLGALT2 inhibitor, as described herein. For example, when the subject is COLGALT2 reference, and therefore has an increased risk of developing OA, the subject is administered an OA therapeutic agent in an amount that is the same as or less than a standard dosage amount or OA therapy, and/or is administered a COLGALT2 inhibitor. In some embodiments, when the subject is heterozygous for a COLGALT2 variant nucleic acid molecule, the subject is administered the OA therapeutic agent in an amount that is the same as or less than a standard dosage amount or OA therapy, and/or is administered a COLGALT2 inhibitor. In some embodiments, when the subject is homozygous for a COLGALT2 variant nucleic acid molecule, the subject is administered an OA therapeutic agent in a standard dosage amount or OA therapy. In some embodiments, the subject is COLGALT2 reference. In some embodiments, the subject is heterozygous for a COLGALT2 variant nucleic acid molecule. In some embodiments, the subject is homozygous for a COLGALT2 variant nucleic acid molecule.

[0106] The present disclosure also provides methods of determining a subject's aggregate burden, or risk score, of having two or more COLGALT2 variant nucleic acid molecules, and/or two or more COLGALT2 variant polypeptides associated with a decreased risk of developing OA. The aggregate burden is the sum of genetic variants that can be carried out in an association analysis with OA. In some embodiments, the subject is homozygous for one or more COLGALT2 variant nucleic acid molecules associated with a decreased risk of developing OA. In some embodiments, the subject is heterozygous for one or more COLGALT2 variant nucleic acid molecules associated with a decreased risk of developing OA. When the subject has a lower aggregate burden, the subject has an increased risk of developing OA, and the subject is administered or continued to be administered the OA therapeutic agent in an amount that is the same as or less than the standard dosage amount or OA therapy, and/or a COLGALT2 inhibitor. When the subject has a higher aggregate burden, the subject has a decreased risk of developing OA and the subject is administered or continued to be administered the OA therapeutic agent in a standard dosage amount or OA therapy. The higher the aggregate burden, the lower the risk of developing OA.

[0107] In some embodiments, a subject's aggregate burden of having any two or more COLGALT2 variant nucleic acid molecules represents a weighted sum of a plurality of any of the COLGALT2 variant nucleic acid molecules. In some embodiments, the aggregate burden is calculated using at least about 2, at least about 3, at least about 4, at least about 5, at least about 10, at least about 20, at least about 30, at least about 40, at least about 50, at least about 60, at least about 70, at least about 80, at least about 100, at least about 120, at least about 150, at least about 200, at least about 250, at least about 300, at least about 400, at least about 500, at least about 1,000, at least about 10,000, at least about 100,000, or at least about or more than 1,000,000 genetic variants present in or around (up to 10 Mb) the COLGALT2 gene, where the genetic burden is the number of alleles multiplied by the association estimate with OA or related outcome for each allele (e.g., a weighted polygenic burden score). In some embodiments, when the subject has an aggregate burden higher than a desired threshold score, the subject has a decreased risk of developing OA. In some embodiments, when the subject has an aggregate burden lower than a desired threshold score, the subject has an increased risk of developing OA.

[0108] In some embodiments, the aggregate burden may be divided into quintiles, e.g., top quintile, second quintile, intermediate quintile, fourth quintile, and bottom quintile, wherein the top quintile of aggregate burden corresponds to the lowest risk group and the bottom quintile of aggregate burden corresponds to the highest risk group. In some embodiments, a subject having a higher aggregate burden comprises the highest weighted aggregate burdens, including, but not limited to the top 10%, top 20%, top 30%, top 40%, or top 50% of aggregate burdens from a subject population. In some embodiments, the genetic variants comprise the genetic variants having association with OA in the top 10%, top 20%, top 30%, top 40%, or top 50% of p-value range for the association. In some embodiments, each of the identified genetic variants comprise the genetic variants having association with OA with p-value of no more than about 10⁻², about 10⁻³, about 10⁻⁴, about 10⁻⁵, about 10⁻⁶, about 10⁻⁷, about 10⁻⁸, about 10⁻⁹, about 10⁻¹⁰, about 10⁻¹¹, about 10⁻¹², about 10⁻¹³, about 10⁻¹⁴, about or 10⁻¹⁵. In some embodiments, the identified genetic variants comprise the genetic variants having association with OA with p-value of less than 5 ×10⁻⁸. In some embodiments, the identified genetic variants comprise genetic variants having association with OA in high-risk subjects as compared to the rest of the reference population with odds ratio (OR) about 1.5 or greater, about 1.75 or greater, about 2.0 or greater, or about 2.25 or greater for the top 20% of the distribution; or about 1.5 or greater, about 1.75 or greater, about 2.0 or greater, about 2.25 or greater, about 2.5 or greater, or about 2.75 or greater. In some embodiments, the odds ratio (OR) may range from about 1.0 to about 1.5, from about 1.5 to about 2.0, from about 2.0 to about 2.5, from about 2.5 to about 3.0, from about 3.0 to about 3.5, from about 3.5 to about 4.0, from about 4.0 to about 4.5, from about 4.5 to about 5.0, from about 5.0 to about 5.5, from about 5.5 to about 6.0, from about 6.0 to about 6.5, from about 6.5 to about 7.0, or greater than 7.0. In some embodiments, high-risk subjects have aggregate burdens in the bottom decile, quintile, or tertile in a reference population. The threshold of the aggregate burden can be determined on the basis of the nature of the intended practical application and the risk difference that would be considered meaningful for that practical application.

[0109] In embodiments where the aggregate burden is determined for COLGALT2 genetic variants associated with OA, then the aggregate burden represents a subject's risk score for developing OA. In some embodiments, the aggregate burden or risk score includes the COLGALT2 variant genomic nucleic acid molecule that comprises any one or more of the genetic variations in the genomic nucleic acid molecule (referring to the chromosome: positions set forth in the GRCh38/hg38 human genome assembly) set forth in Table 4, or an mRNA molecule produced therefrom, or a cDNA molecule produced from the mRNA molecule. In some embodiments, a subject's aggregate burden can be determined for COLGALT2 genetic variants associated with OA in combination with additional genetic variants for other genes also associated with OA (such as, for example, Cartilage Intermediate Layer Protein 2 (CILP2)) to produce a polygenic risk score (PRS) for developing OA. In some embodiments, the PRS includes the COLGALT2 variant genomic nucleic acid molecule that comprises any one or more of the genetic variations in the genomic nucleic acid molecule (referring to the chromosome: positions set forth in the GRCh38/hg38 human genome assembly) set forth in Table 4, or an mRNA molecule produced therefrom, or a cDNA molecule produced from the mRNA molecule.

[0110] The present disclosure also provides methods of detecting the presence or absence of a COLGALT2 variant nucleic acid molecule (i.e., a genomic nucleic acid molecule, an mRNA molecule, or a cDNA molecule produced from an mRNA molecule) in a biological sample from a subject. It is understood that gene sequences within a population and mRNA molecules encoded by such genes can vary due to polymorphisms such as single-nucleotide polymorphisms.

[0111] The biological sample can be derived from any cell, tissue, or biological fluid from the subject. The biological sample may comprise any clinically relevant tissue, such as a bone marrow sample, a tumor biopsy, a fine needle aspirate, or a sample of bodily fluid, such as blood, gingival crevicular fluid, plasma, serum, lymph, ascitic fluid, cystic fluid, or urine. In some cases, the sample comprises a buccal swab. The biological sample used in the methods disclosed herein can vary based on the assay format, nature of the detection method, and the tissues, cells, or extracts that are used as the sample. A biological sample can be processed differently depending on the assay being employed. For example, when detecting any COLGALT2 variant nucleic acid molecule, preliminary processing designed to isolate or enrich the biological sample for the genomic DNA can be employed. A variety of techniques may be used for this purpose. When detecting the level of any COLGALT2 variant nucleic acid molecule, different techniques can be used to enrich the biological sample with mRNA molecules. Various methods to detect the presence or level of an mRNA molecule or the presence of a particular variant genomic DNA locus can be used.

[0112] In some embodiments, detecting a COLGALT2 variant nucleic acid molecule in a subject comprises performing a sequence analysis on a biological sample obtained from the subject to determine whether a COLGALT2 genomic nucleic acid molecule in the biological sample, and/or a COLGALT2 mRNA molecule in the biological sample, and/or a COLGALT2 cDNA molecule produced from an mRNA molecule in the biological sample, is present in the sample. In some embodiments, the methods detect the COLGALT2 variant genomic nucleic acid molecule that comprises any one or more of the genetic variations in the genomic nucleic acid molecule (referring to the chromosome: positions set forth in the GRCh38/hg38 human genome assembly) set forth in Table 4, or an mRNA molecule produced therefrom, or a cDNA molecule produced from the mRNA molecule.

[0113] In some embodiments, the methods of detecting the presence or absence of a COLGALT2 variant nucleic acid molecule (such as, for example, a genomic nucleic acid molecule, an mRNA molecule, and/or a cDNA molecule produced from an mRNA molecule) in a subject comprise performing an assay on a biological sample obtained from the subject. The assay determines whether a nucleic acid molecule in the biological sample comprises a particular nucleotide sequence.

[0114] In some embodiments, the biological sample comprises a cell or cell lysate. Such methods can further comprise, for example, obtaining a biological sample from the subject comprising a COLGALT2 genomic nucleic acid molecule or mRNA molecule, and if mRNA, optionally reverse transcribing the mRNA into cDNA. Such assays can comprise, for example determining the identity of these positions of the particular COLGALT2 nucleic acid molecule. In some embodiments, the method is an in vitro method.

[0115] In some embodiments, the determining step, detecting step, or sequence analysis comprises sequencing at least a portion of the nucleotide sequence of the COLGALT2 genomic nucleic acid molecule, the COLGALT2 mRNA molecule, or the COLGALT2 cDNA molecule in the biological sample that comprises a genetic variation compared to the corresponding COLGALT2 reference molecule. In some embodiments, the sequenced portion comprises one or more variations that cause a loss-of-function (partial or complete) or are predicted to cause a loss-of-function (partial or complete).

[0116] In some embodiments, the assay comprises sequencing the entire nucleic acid molecule. In some embodiments, only a COLGALT2 genomic nucleic acid molecule is analyzed. In some embodiments, only a COLGALT2 mRNA is analyzed. In some embodiments, only a COLGALT2 cDNA obtained from the COLGALT2 mRNA is analyzed.

[0117] Alteration-specific polymerase chain reaction techniques can be used to detect mutations such as SNPs in a nucleic acid sequence. Alteration-specific primers can be used because the DNA polymerase will not extend when a mismatch with the template is present.

[0118] In some embodiments, the nucleic acid molecule in the sample is mRNA and the mRNA is reverse-transcribed into a cDNA prior to the amplifying step. In some embodiments, the nucleic acid molecule is present within a cell obtained from the subject.

[0119] In some embodiments, the assay comprises contacting the biological sample with a primer or probe, such as an alteration-specific primer or alteration-specific probe, that specifically hybridizes to a COLGALT2 variant genomic sequence, variant mRNA sequence, or variant cDNA sequence and not the corresponding COLGALT2 reference sequence under stringent conditions and determining whether hybridization has occurred.

[0120] In some embodiments, the determining step, detecting step, or sequence analysis comprises: a) amplifying at least a portion of the COLGALT2 nucleic acid molecule that encodes the COLGALT2 polypeptide; b) labeling the amplified nucleic acid molecule with a detectable label; c) contacting the labeled nucleic acid molecule with a support comprising an alteration-specific probe; and d) detecting the detectable label.

[0121] In some embodiments, the assay comprises RNA sequencing (RNA-Seq). In some embodiments, the assays also comprise reverse transcribing mRNA into cDNA, such as by the reverse transcriptase polymerase chain reaction (RT-PCR).

[0122] In some embodiments, the methods utilize probes and primers of sufficient nucleotide length to bind to the target nucleotide sequence and specifically detect and/or identify a polynucleotide comprising a COLGALT2 variant genomic nucleic acid molecule, variant mRNA molecule, or variant cDNA molecule. The hybridization conditions or reaction conditions can be determined by the operator to achieve this result. The nucleotide length may be any length that is sufficient for use in a detection method of choice, including any assay described or exemplified herein. Such probes and primers can hybridize specifically to a target nucleotide sequence under high stringency hybridization conditions. Probes and primers may have complete nucleotide sequence identity of contiguous nucleotides within the target nucleotide sequence, although probes differing from the target nucleotide sequence and that retain the ability to specifically detect and/or identify a target nucleotide sequence may be designed by conventional methods. Probes and primers can have about 80%, about 85%, about 90%, about 91%, about 92%, about 93%, about 94%, about 95%, about 96%, about 97%, about 98%, about 99%, or 100% sequence identity or complementarity with the nucleotide sequence of the target nucleic acid molecule.

[0123] Illustrative examples of nucleic acid sequencing techniques include, but are not limited to, chain terminator (Sanger) sequencing and dye terminator sequencing. Other methods involve nucleic acid hybridization methods other than sequencing, including using labeled primers or probes directed against purified DNA, amplified DNA, and fixed cell preparations (fluorescence in situ hybridization (FISH)). In some methods, a target nucleic acid molecule may be amplified prior to or simultaneous with detection. Illustrative examples of nucleic acid amplification techniques include, but are not limited to, polymerase chain reaction (PCR), ligase chain reaction (LCR), strand displacement amplification (SDA), and nucleic acid sequence based amplification (NASBA). Other methods include, but are not limited to, ligase chain reaction, strand displacement amplification, and thermophilic SDA (tSDA).

[0124] In hybridization techniques, stringent conditions can be employed such that a probe or primer will specifically hybridize to its target. In some embodiments, a polynucleotide primer or probe under stringent conditions will hybridize to its target sequence to a detectably greater degree than to other non-target sequences, such as, at least 2-fold, at least 3-fold, at least 4-fold, or more over background, including over 10-fold over background. In some embodiments, a polynucleotide primer or probe under stringent conditions will hybridize to its target nucleotide sequence to a detectably greater degree than to other nucleotide sequences by at least 2-fold. In some embodiments, a polynucleotide primer or probe under stringent conditions will hybridize to its target nucleotide sequence to a detectably greater degree than to other nucleotide sequences by at least 3-fold. In some embodiments, a polynucleotide primer or probe under stringent conditions will hybridize to its target nucleotide sequence to a detectably greater degree than to other nucleotide sequences by at least 4-fold. In some embodiments, a polynucleotide primer or probe under stringent conditions will hybridize to its target nucleotide sequence to a detectably greater degree than to other nucleotide sequences by over 10-fold over background. Stringent conditions are sequence-dependent and will be different in different circumstances.

[0125] Appropriate stringency conditions which promote DNA hybridization, for example, 6× sodium chloride/sodium citrate (SSC) at about 45° C., followed by a wash of 2×SSC at 50° C., are known or can be found in Current Protocols in Molecular Biology, John Wiley & Sons, N.Y. (1989), 6.3.1-6.3.6. Typically, stringent conditions for hybridization and detection will be those in which the salt concentration is less than about 1.5 M Na⁺ ion, typically about 0.01 to 1.0 M Na⁺ ion concentration (or other salts) at pH 7.0 to 8.3 and the temperature is at least about 30° C. for short probes (such as, for example, 10 to 50 nucleotides) and at least about 60° C. for longer probes (such as, for example, greater than 50 nucleotides). Stringent conditions may also be achieved with the addition of destabilizing agents such as formamide. Optionally, wash buffers may comprise about 0.1% to about 1% SDS. Duration of hybridization is generally less than about 24 hours, usually about 4 to about 12 hours. The duration of the wash time will be at least a length of time sufficient to reach equilibrium.

[0126] In some embodiments, such isolated nucleic acid molecules comprise or consist of at least about 5, at least about 8, at least about 10, at least about 11, at least about 12, at least about 13, at least about 14, at least about 15, at least about 16, at least about 17, at least about 18, at least about 19, at least about 20, at least about 21, at least about 22, at least about 23, at least about 24, at least about 25, at least about 30, at least about 35, at least about 40, at least about 45, at least about 50, at least about 55, at least about 60, at least about 65, at least about 70, at least about 75, at least about 80, at least about 85, at least about 90, at least about 95, at least about 100, at least about 200, at least about 300, at least about 400, at least about 500, at least about 600, at least about 700, at least about 800, at least about 900, at least about 1000, at least about 2000, at least about 3000, at least about 4000, or at least about 5000 nucleotides. In some embodiments, such isolated nucleic acid molecules comprise or consist of at least about 5, at least about 8, at least about 10, at least about 11, at least about 12, at least about 13, at least about 14, at least about 15, at least about 16, at least about 17, at least about 18, at least about 19, at least about 20, at least about 21, at least about 22, at least about 23, at least about 24, or at least about 25 nucleotides. In some embodiments, the isolated nucleic acid molecules comprise or consist of at least about 18 nucleotides. In some embodiments, the isolated nucleic acid molecules comprise or consists of at least about 15 nucleotides. In some embodiments, the isolated nucleic acid molecules consist of or comprise from about 10 to about 35, from about 10 to about 30, from about 10 to about 25, from about 12 to about 30, from about 12 to about 28, from about 12 to about 24, from about 15 to about 30, from about 15 to about 25, from about 18 to about 30, from about 18 to about 25, from about 18 to about 24, or from about 18 to about 22 nucleotides. In some embodiments, the isolated nucleic acid molecules consist of or comprise from about 18 to about 30 nucleotides. In some embodiments, the isolated nucleic acid molecules comprise or consist of at least about 15 nucleotides to at least about 35 nucleotides.

[0127] In some embodiments, such isolated nucleic acid molecules hybridize to COLGALT2 variant nucleic acid molecules (such as genomic nucleic acid molecules, mRNA molecules, and/or cDNA molecules) under stringent conditions. Such nucleic acid molecules can be used, for example, as probes, primers, alteration-specific probes, or alteration-specific primers as described or exemplified herein, and include, without limitation primers, probes, antisense RNAs, shRNAs, and siRNAs, each of which is described in more detail elsewhere herein and can be used in any of the methods described herein.

[0128] In some embodiments, the isolated nucleic acid molecules hybridize to at least about 15 contiguous nucleotides of a nucleic acid molecule that is at least about 70%, at least about 75%, at least about 80%, at least about 85%, at least about 90%, at least about 95%, at least about 96%, at least about 97%, at least about 98%, at least about 99%, or 100% identical to COLGALT2 variant nucleic acid molecules. In some embodiments, the isolated nucleic acid molecules consist of or comprise from about 15 to about 100 nucleotides, or from about 15 to about 35 nucleotides. In some embodiments, the isolated nucleic acid molecules consist of or comprise from about 15 to about 100 nucleotides. In some embodiments, the isolated nucleic acid molecules consist of or comprise from about 15 to about 35 nucleotides.

[0129] In some embodiments, the alteration-specific probes and alteration-specific primers comprise DNA. In some embodiments, the alteration-specific probes and alteration-specific primers comprise RNA.

[0130] In some embodiments, the probes and primers described herein (including alteration-specific probes and alteration-specific primers) have a nucleotide sequence that specifically hybridizes to any of the nucleic acid molecules disclosed herein, or the complement thereof. In some embodiments, the probes and primers specifically hybridize to any of the nucleic acid molecules disclosed herein under stringent conditions.

[0131] In some embodiments, the primers, including alteration-specific primers, can be used in second generation sequencing or high throughput sequencing. In some instances, the primers, including alteration-specific primers, can be modified. In particular, the primers can comprise various modifications that are used at different steps of, for example, Massive Parallel Signature Sequencing (MPSS), Polony sequencing, and 454 Pyrosequencing. Modified primers can be used at several steps of the process, including biotinylated primers in the cloning step and fluorescently labeled primers used at the bead loading step and detection step. Polony sequencing is generally performed using a paired-end tags library wherein each molecule of DNA template is about 135 bp in length. Biotinylated primers are used at the bead loading step and emulsion PCR. Fluorescently labeled degenerate nonamer oligonucleotides are used at the detection step. An adaptor can contain a 5′-biotin tag for immobilization of the DNA library onto streptavidin-coated beads.

[0132] The probes and primers described herein can be used to detect a nucleotide variation within any of the COLGALT2 variant nucleic acid molecules disclosed herein. The primers described herein can be used to amplify any COLGALT2 variant nucleic acid molecule, or a fragment thereof.

[0133] In the context of the disclosure “specifically hybridizes” means that the probe or primer (such as, for example, the alteration-specific probe or alteration-specific primer) does not hybridize to a nucleic acid sequence encoding a COLGALT2 reference genomic nucleic acid molecule, a COLGALT2 reference mRNA molecule, and/or a COLGALT2 reference cDNA molecule.

[0134] In some embodiments, the probes (such as, for example, an alteration-specific probe) comprise a label. In some embodiments, the label is a fluorescent label, a radiolabel, or biotin.

[0135] The present disclosure also provides supports comprising a substrate to which any one or more of the probes disclosed herein is attached. Solid supports are solid-state substrates or supports with which molecules, such as any of the probes disclosed herein, can be associated. A form of solid support is an array. Another form of solid support is an array detector. An array detector is a solid support to which multiple different probes have been coupled in an array, grid, or other organized pattern. A form for a solid-state substrate is a microtiter dish, such as a standard 96-well type. In some embodiments, a multiwell glass slide can be employed that normally contains one array per well.

[0136] The genomic nucleic acid molecules, mRNA molecules, and cDNA molecules can be from any organism. For example, the genomic nucleic acid molecules, mRNA molecules, and cDNA molecules can be human or an ortholog from another organism, such as a non-human mammal, a rodent, a mouse, or a rat. It is understood that gene sequences within a population can vary due to polymorphisms such as single-nucleotide polymorphisms.

[0137] Also provided herein are functional polynucleotides that can interact with the disclosed nucleic acid molecules. Examples of functional polynucleotides include, but are not limited to, antisense molecules, aptamers, ribozymes, triplex forming molecules, and external guide sequences. The functional polynucleotides can act as effectors, inhibitors, modulators, and stimulators of a specific activity possessed by a target molecule, or the functional polynucleotides can possess a de novo activity independent of any other molecules.

[0138] The isolated nucleic acid molecules disclosed herein can comprise RNA, DNA, or both RNA and DNA. The isolated nucleic acid molecules can also be linked or fused to a heterologous nucleic acid sequence, such as in a vector, or a heterologous label. For example, the isolated nucleic acid molecules disclosed herein can be within a vector or as an exogenous donor sequence comprising the isolated nucleic acid molecule and a heterologous nucleic acid sequence. The isolated nucleic acid molecules can also be linked or fused to a heterologous label. The label can be directly detectable (such as, for example, fluorophore) or indirectly detectable (such as, for example, hapten, enzyme, or fluorophore quencher). Such labels can be detectable by spectroscopic, photochemical, biochemical, immunochemical, or chemical means. Such labels include, for example, radiolabels, pigments, dyes, chromogens, spin labels, and fluorescent labels. The label can also be, for example, a chemiluminescent substance; a metal-containing substance; or an enzyme, where there occurs an enzyme-dependent secondary generation of signal. The term “label” can also refer to a “tag” or hapten that can bind selectively to a conjugated molecule such that the conjugated molecule, when added subsequently along with a substrate, is used to generate a detectable signal. For example, biotin can be used as a tag along with an avidin or streptavidin conjugate of horseradish peroxidate (HRP) to bind to the tag, and examined using a calorimetric substrate (such as, for example, tetramethylbenzidine (TMB)) or a fluorogenic substrate to detect the presence of HRP. Exemplary labels that can be used as tags to facilitate purification include, but are not limited to, myc, HA, FLAG or 3×FLAG, 6×his or polyhistidine, glutathione-S-transferase (GST), maltose binding protein, an epitope tag, or the Fc portion of immunoglobulin. Numerous labels include, for example, particles, fluorophores, haptens, enzymes and their calorimetric, fluorogenic and chemiluminescent substrates and other labels.

[0139] Percent identity (or percent complementarity) between particular stretches of nucleotide sequences within nucleic acid molecules or amino acid sequences within polypeptides can be determined routinely using BLAST programs (basic local alignment search tools) and PowerBLAST programs (Altschul et al., J. Mol. Biol., 1990, 215, 403-410; Zhang and Madden, Genome Res., 1997, 7, 649-656) or by using the Gap program (Wisconsin Sequence Analysis Package, Version 8 for Unix, Genetics Computer Group, University Research Park, Madison Wis.), using default settings, which uses the algorithm of Smith and Waterman (Adv. Appl. Math., 1981, 2, 482-489). Herein, if reference is made to percent sequence identity, the higher percentages of sequence identity are preferred over the lower ones.

[0140] The present disclosure also provides OA therapeutic agents that treat, prevent, or inhibit OA for use in the treatment or prevention of OA in a subject having a COLGALT2 variant nucleic acid molecule. Any of the OA therapeutic agents that treat, prevent, or inhibit OA described herein can be used herein. Any of the COLGALT2 variant nucleic acid molecules disclosed herein can be used herein. In some embodiments, the COLGALT2 variant nucleic acid molecule is a COLGALT2 variant genomic nucleic acid molecule that comprises any one or more of the genetic variations in the genomic nucleic acid molecule (referring to the chromosome: positions set forth in the GRCh38/hg38 human genome assembly) set forth in Table 4, or an mRNA molecule produced therefrom, or a cDNA molecule produced from the mRNA molecule.

[0141] The present disclosure also provides OA therapeutic agents that treat, prevent, or inhibit OA for use in the preparation of a medicament for treating or preventing OA in a subject having a COLGALT2 variant nucleic acid molecule. Any of the OA therapeutic agents that treat, prevent, or inhibit OA described herein can be used herein. Any of the COLGALT2 variant nucleic acid molecules disclosed herein can be used herein. In some embodiments, the COLGALT2 variant nucleic acid molecule is a COLGALT2 variant genomic nucleic acid molecule that comprises any one or more of the genetic variations in the genomic nucleic acid molecule (referring to the chromosome: positions set forth in the GRCh38/hg38 human genome assembly) set forth in Table 4, or an mRNA molecule produced therefrom, or a cDNA molecule produced from the mRNA molecule.

[0142] The present disclosure also provides COLGALT2 inhibitors for use in the treatment or prevention of OA in a subject that is COLGALT2 reference or is heterozygous for a COLGALT2 variant nucleic acid molecule. Any of the COLGALT2 inhibitors described herein can be used herein. Any of the COLGALT2 variant nucleic acid molecules disclosed herein can be used herein. In some embodiments, the COLGALT2 variant nucleic acid molecule is a COLGALT2 variant genomic nucleic acid molecule that comprises any one or more of the genetic variations in the genomic nucleic acid molecule (referring to the chromosome: positions set forth in the GRCh38/hg38 human genome assembly) set forth in Table 4, or an mRNA molecule produced therefrom, or a cDNA molecule produced from the mRNA molecule.

[0143] The present disclosure also provides COLGALT2 inhibitors for use in the preparation of a medicament for treating or preventing OA in a subject that is COLGALT2 reference or is heterozygous for a COLGALT2 variant nucleic acid molecule. Any of the COLGALT2 inhibitors described herein can be used herein. Any of the COLGALT2 variant nucleic acid molecules disclosed herein can be used herein. In some embodiments, the COLGALT2 variant nucleic acid molecule is a COLGALT2 variant genomic nucleic acid molecule that comprises any one or more of the genetic variations in the genomic nucleic acid molecule (referring to the chromosome: positions set forth in the GRCh38/hg38 human genome assembly) set forth in Table 4, or an mRNA molecule produced therefrom, or a cDNA molecule produced from the mRNA molecule.

[0144] In some embodiments, the COLGALT2 inhibitor and the OA therapeutic agent are disposed within a pharmaceutical composition. In some embodiments, the COLGALT2 inhibitor is disposed within a first pharmaceutical composition and the OA therapeutic agent is disposed within a second pharmaceutical composition. In some embodiments, the first pharmaceutical composition and the second pharmaceutical composition are administered simultaneously. In some embodiments, the first pharmaceutical composition is administered before the second pharmaceutical composition. In some embodiments, the first pharmaceutical composition is administered after the second pharmaceutical composition.

[0145] All patent documents, websites, other publications, accession numbers and the like cited above or below are incorporated by reference in their entirety for all purposes to the same extent as if each individual item were specifically and individually indicated to be so incorporated by reference. If different versions of a sequence are associated with an accession number at different times, the version associated with the accession number at the effective filing date of this application is meant. The effective filing date means the earlier of the actual filing date or filing date of a priority application referring to the accession number if applicable. Likewise, if different versions of a publication, website or the like are published at different times, the version most recently published at the effective filing date of the application is meant unless otherwise indicated. Any feature, step, element, embodiment, or aspect of the present disclosure can be used in combination with any other feature, step, element, embodiment, or aspect unless specifically indicated otherwise. Although the present disclosure has been described in some detail by way of illustration and example for purposes of clarity and understanding, it will be apparent that certain changes and modifications may be practiced within the scope of the appended claims.

[0146] The following examples are provided to describe the embodiments in greater detail. They are intended to illustrate, not to limit, the claimed embodiments. The following examples provide those of ordinary skill in the art with a disclosure and description of how the compounds, compositions, articles, devices and/or methods described herein are made and evaluated and are intended to be purely exemplary and are not intended to limit the scope of any claims. Efforts have been made to ensure accuracy with respect to numbers (such as, for example, amounts, temperature, etc.), but some errors and deviations may be accounted for. Unless indicated otherwise, parts are parts by weight, temperature is in ° C. or is at ambient temperature, and pressure is at or near atmospheric.

### EXAMPLES

### Example 1: General Methods

### Participating Cohorts

[0147] Genetic association studies were performed in the United Kingdom Biobank (UKB) cohort, the DiscoverEHR cohort from the Geisinger Health System (GHS) MyCode Community Health Initiative, Mount Sinai BioMe Biobank cohort (SINAI), The University of Pennsylvania Penn Medicine BioBank (UPENN-PMBB), Malmo Diet and Cancer Study (MDCS). UKB is a population-based cohort study of people aged between 40 and 69 years recruited through 22 testing centers in the UK between 2006-2010 (Sudlow et al., PLOS Med., 2015, 12, e1001779). Over 430,000 European ancestry participants from UKB with available whole-exome sequencing and clinical phenotype data were included. The GHS MyCode study Community Health Initiative is a health system-based cohort of patients from Central and Eastern Pennsylvania (USA) recruited in 2007-2019 (Carey et al., Genet Med., 2016, 18, 906-13). Over 130,000 European ancestry participants from GHS with available whole-exome sequencing and clinical phenotype data were included. SINAI is a health-system based cohort of patients from the Mount Sinai BioMe Biobank, recruited from the Mount Sinai Health System (Abul-Husn et al., Cell, 2019, 177, 58-69). UPENN-PMBB is a health-system based cohort of patients from the University of Pennsylvania Penn Medicine BioBank (Park et al., Genet. Med., 2020, 22, 102-111). MDCS is a Swedish population-based, prospective, observational cohort recruited between 1991 and 1996 (Berglund et al., J. Intern. Med., 1993, 233, 45-51).

### Phenotype Definitions

[0148] Osteoarthritis cases were adjudicated in each cohort on the basis of one or more of the following criteria: 1) an electronic health record history of osteoarthritis (using International Classification of Diseases, Tenth Revision [ICD-10] diagnosis codes M15, M16, M17, M18, M19, M47 or corresponding Ninth Revision [ICD-9] codes), in at least one inpatient encounter or at least two outpatient encounters or if noted as a cause of death; 2) an electronic health record or self-reported history of surgical procedures relating to knee and/or hip replacement; 3) a self-reported physician diagnosis of osteoarthritis. Individuals not meeting any of the criteria for osteoarthritis were used as controls. In addition, individuals were excluded from the control group if they had an electronic health record or self-reported history of other forms of arthritis or joint-related symptoms, or a surgical procedure involving a joint.

[0149] An imaging phenotype was derived from dual x-ray absorptiometry (DXA) knee images. DXA images are 2D projections similar to standard x-ray acquisition. The knee bones on DXA images were segmented using a convolutional network algorithm based on the U-Net architecture. The joint space width (JSW) was quantified after measuring the distance between the proximal tibia and the distal femur. The JSW was used as an independent imaging-derived marker of joint health.

[0150] Knee and hip replacement cases were adjudicated in each cohort on the basis of: 1) electronic health record history of knee or hip replacement surgery, defined using OPCS-4, CPT-4, ICD-10-PCS, or NOMESCO procedure codes, or 2) self-reported history of knee or hip joint replacement surgery. Individuals not meeting any of the criteria for knee or hip replacement were used as controls. In addition, individuals were excluded from the control group if they had an electronic health record or self-reported history of other forms of arthritis or joint-related symptoms, or a surgical procedure involving a joint.

### Genotype Data

[0151] High coverage whole exome sequencing was performed as previously described (Dewey et al., Science, 2016, 354, aaf6814; Van Hout et al., Nature, 2020, 586, 749-756) and as summarized below. NimbleGen probes (VCRome; for part of the GHS cohort) or a modified version of the xGen design available from Integrated DNA Technologies (IDT; for the rest of GHS and other cohorts) were used for target sequence capture of the exome. A unique 6 base pair (bp) barcode (VCRome) or 10 bp barcode (IDT) was added to each DNA fragment during library preparation to facilitate multiplexed exome capture and sequencing. Equal amounts of sample were pooled prior to exome capture. Sequencing was performed using 75 bp paired-end reads on Illumina v4 HiSeq 2500 (for part of the GHS cohort) or NovaSeq (for the rest of GHS and other cohorts) instruments. Sequencing had a coverage depth (i.e., number of sequence-reads covering each nucleotide in the target areas of the genome) sufficient to provide greater than 20× coverage over 85% of targeted bases in 96% of VCRome samples and 20× coverage over 90% of targeted bases in 99% of IDT samples. Data processing steps included sample de-multiplexing using Illumina software, alignment to the GRCh38 Human Genome reference sequence including generation of binary alignment and mapping files (BAM), processing of BAM files (e.g., marking of duplicate reads and other read mapping evaluations). Variant calling was performed using the GLNexus system (DOI: 10.1101/343970). Variant mapping and annotation were based on the GRCh38 Human Genome reference sequence and Ensembl v85 gene definitions using the snpEff software. The snpEff predictions that involve protein-coding transcripts with an annotated start and stop were then combined into a single functional impact prediction by selecting the most deleterious functional effect class for each gene. The hierarchy (from most to least deleterious) for these annotations was frameshift, stop-gain, stop-loss, splice acceptor, splice donor, stop-lost, in-frame indel, missense, other annotations. Predicted LOF genetic variants included: a) insertions or deletions resulting in a frameshift, b) insertions, deletions or single nucleotide variants resulting in the introduction of a premature stop codon or in the loss of the transcription start site or stop site, and c) variants in donor or acceptor splice sites. Missense variants were classified for likely functional impact according to the number of in silico prediction algorithms that predicted deleteriousness using SIFT (Adzhubei et al., Nat. Methods, 2010, 7, 248-9) and Polyphen2_HVAR (Adzhubei et al., Nat. Methods., 2010, 7, 248-9), LRT (Chun et al., Genome Res., 2009, 19, 1553-61) and MutationTaster (Schwarz et al., Nat. Methods., 2010, 7, 575-6). For each gene, the alternative allele frequency (AAF) and functional annotation of each variant determined inclusion into these 7 gene burden exposures: 1) pLOF variants with AAF <1%; 2) pLOF or missense variants predicted deleterious by 5/5 algorithms with AAF <1%; 3) pLOF or missense variants predicted deleterious by 5/5 algorithms with AAF <0.1%; 4) pLOF or missense variants predicted deleterious by at least 1/5 algorithms with AAF <1%; 5) pLOF or missense variants predicted deleterious by at least 1/5 algorithms with AAF <0.1%; 6) pLOF or any missense variants with AAF <1%; 7) pLOF or any missense variants with AAF <0.1%.

Association Analysis of Gene Burden of Rare pLOF and Missense Variation

[0152] An association between the burden of rare predicted loss-of-function or missense variants in a given gene and phenotype was analyzed by fitting a linear (for quantitative traits) or firth bias-corrected logistic (for binary traits) regression model adjusted for a polygenic score that approximates a genomic kinship matrix using REGENIE (Mbatchou et al., Nat. Genet., 2021, 53, 1097-1103). Analyses were stratified by ancestry and adjusted for age, sex, age2, age-by-sex and age2-by-sex interaction terms, and several cohort-specific covariates including batch-related covariates, and common and rare variant-derived principal components. Results across cohorts for each variant-phenotype association were combined using fixed effect inverse variance weighted meta-analysis. In gene burden tests, all individuals are labeled as heterozygotes if they carry one or more qualifying rare variant (as described above based on frequency and functional annotation) and as homozygotes if they carry any qualifying variant in the homozygous state. This “composite genotype” is then used to test for association.

### Example 2: Association of Osteaoarthritis and COLGALT2

[0153] Using the data and methods described in Example 1, the burden of COLGALT2 rare pLoF and missense variants was found to be associated with lower odds of osteoarthritis of the knee and/or hip at exome-wide significance (Odds ratio, 0.89; p-value, 2.3E-08; see, Table 3).

TABLE 3
Estimates of the association between the burden of rare pLOF plus
missense variants in COLGALT2 and risk of OA of the hip and/or knee

| OR | | | | | | |
|---|---|---|---|---|---|---|
| (95% | | | Genotype Counts | Genotype Counts | pLoF only | |
| CI) | Pval | AAF | Cases | Controls | OR | Pval |
| 0.89 | 2.3E−08 | 0.0212 | 89,969\|3,715\|11 | 365,348\|16,298\|53 | 0.58 | 1.3E−02 |
| (0.86, | | | | | | |
| 0.93) | | | | | | |

The odds ratio (OR) and p-value (Pval) for the association between rare pLOF variants only and OA of the hip and/or knee is shown in the final two columns. The genotype counts are shown as three numbers separated by “|”, referring to the number of individuals carrying no relevant rare coding variants in COLGALT2 (homozygous non-carriers), the number of individuals carrying a relevant rare coding variant in a single COLGALT2 allele (heterozygous carriers), and the number of individuals carrying a relevant rare coding variant in both COLGALT2 alleles (homozygous carriers). The genotype counts are shown by case/control status for OA of the hip and/or knee. pLOF, predicted loss of function; AAF, alternative allele frequency; OR, odds ratio; CI, confidence interval; Pval, p-value.

[0154] Rare coding variants in COLGALT2 were also observed to be associated with lower risk of knee and hip OA (see, FIG. 1). In addition, association between COLGALT2 rare variants and mJSW validates protective association with OA (see, FIG. 2).

[0155] FIG. 1 shows the association between rare coding variants in COLGALT2 and osteoarthritis of the hip, knee, and spine. Specifically, three gene burden exposures are shown: pLOF or missense variants predicted deleterious by 1/5 algorithms with AAF <1%; pLOF or missense variants predicted deleterious by at least 5/5 algorithms with AAF <1%; and pLOF variants only with AAF <1%. The genotype counts are shown as three numbers separated by “|”, referring to the number of individuals carrying no relevant rare coding variants in COLGALT2 (homozygous non-carriers), the number of individuals carrying a relevant rare coding variant in a single COLGALT2 allele (heterozygous carriers), and the number of individuals carrying a relevant rare coding variant in both COLGALT2 alleles (homozygous carriers). The genotype counts are shown by case/control status for OA of the hip and/or knee. pLOF, predicted loss of function; AAF, alternative allele frequency; OR, odds ratio; CI, confidence interval; Pval, p-value.

[0156] FIG. 2 shows the association between rare coding variants in COLGALT2 and minimum joint space width (mJSW), derived from DXA imaging. Specifically, two gene burden exposures are shown: pLOF or missense variants predicted deleterious by 1/5 algorithms with AAF <1%, and pLOF variants only with AAF <1%. The genotype counts are shown as three numbers separated by “|”, referring to the number of individuals carrying no relevant rare coding variants in COLGALT2 (homozygous non-carriers), the number of individuals carrying a relevant rare coding variant in a single COLGALT2 allele (heterozygous carriers), and the number of individuals carrying a relevant rare coding variant in both COLGALT2 alleles (homozygous carriers). pLOF, predicted loss of function; AAF, alternative allele frequency; OR, odds ratio; CI, confidence interval; Pval, p-value.

[0157] FIG. 3 shows the association between rare coding variants in COLGALT2 and risk of knee or hip replacement. Specifically, two gene burden exposures are shown: pLOF or missense variants predicted deleterious by 1/5 algorithms with AAF <1%, and pLOF variants only with AAF <1%. The genotype counts are shown as three numbers separated by “|”, referring to the number of individuals carrying no relevant rare coding variants in COLGALT2 (homozygous non-carriers), the number of individuals carrying a relevant rare coding variant in a single COLGALT2 allele (heterozygous carriers), and the number of individuals carrying a relevant rare coding variant in both COLGALT2 alleles (homozygous carriers). The genotype counts are shown by case/control status for joint replacement of the hip and/or knee. pLOF, predicted loss of function; AAF, alternative allele frequency; OR, odds ratio; CI, confidence interval; Pval, p-value.

[0158] Table 4 includes all pLoF and missense variants detected via exome sequencing of COLGALT2, and which were included in the analysis of OA phenotypes. CPRA indicates the genomic coordinates: chromosome, physical genomic position in base pairs, reference allele, and alternative allele for each variant, according to build 38 of the Human Genome sequence by the Human Genome Reference Consortium. The HGVS.p and HGVS.c columns indicate protein and coding DNA changes according to the Human Genome Variation Society nomenclature. Effect on transcript column indicates predicted impact of variants on the canonical COLGALT2 transcript (ENST00000361927.9).

TABLE 4

| | | | Variant |
|---|---|---|---|
| Name | Hgvsc (ENST) | Hgvsp (ENSP) | effect |
| 1:183951053:A:G | 00000361927.9:c.1090T > C | 00000354960.4:p.Tyr364His | missense |
| 1:183951055:A:C | 00000361927.9:c.1088T > G | 00000354960.4:p.Leu363Arg | missense |
| 1:183951058:G:T | 00000361927.9:c.1085C > A | 00000354960.4:p.Thr362Lys | missense |
| 1:183951061:C:A | 00000361927.9:c.1082G > T | 00000354960.4:p.Arg361Leu | missense |
| 1:183951061:C:T | 00000361927.9:c.1082G > A | 00000354960.4:p.Arg361His | missense |
| 1:183951062:G:A | 00000361927.9:c.1081C > T | 00000354960.4:p.Arg361Cys | missense |
| 1:183951066:C:G | 00000361927.9:c.1077G > C | 00000354960.4:p.Met359Ile | missense |
| 1:183951067:A:G | 00000361927.9:c.1076T > C | 00000354960.4:p.Met359Thr | missense |
| 1:183951070:C:T | 00000361927.9:c.1073G > A | 00000354960.4:p.Arg358GIn | missense |
| 1:183951071:G:A | 00000361927.9:c.1072C > T | 00000354960.4:p.Arg358Trp | missense |
| 1:183951073:T:C | 00000361927.9:c.1070A > G | 00000354960.4:p.Asp357Gly | missense |
| 1:183951074:C:T | 00000361927.9:c.1069G > A | 00000354960.4:p.Asp357Asn | missense |
| 1:183951076:C:T | 00000361927.9:c.1067G > A | 00000354960.4:p.Arg356GIn | missense |
| 1:183951077:G:A | 00000361927.9:c.1066C > T | 00000354960.4:p.Arg356Trp | missense |
| 1:183951088:C:T | 00000361927.9:c.1055G > A | 00000354960.4:p.Arg352Lys | missense |
| 1:183951091:C:T | 00000361927.9:c.1052G > A | 00000354960.4:p.Arg351His | missense |
| 1:183951092:G:A | 00000361927.9:c.1051C > T | 00000354960.4:p.Arg351Cys | missense |
| 1:183951092:G:C | 00000361927.9:c.1051C > G | 00000354960.4:p.Arg351Gly | missense |
| 1:183951092:G:T | 00000361927.9:c.1051C > A | 00000354960.4:p.Arg351Ser | missense |
| 1:183951104:T:C | 00000361927.9:c.1039A > G | 00000354960.4:p.Ile347Val | missense |
| 1:183951109:A:C | 00000361927.9:c.1034T > G | 00000354960.4:p.Phe345Cys | missense |
| 1:183954761:C:A | 00000361927.9:c.1029 + 1G > T | NA | splice_donor |
| 1:183954763:T:G | 00000361927.9:c.1028A > C | 00000354960.4:p.Glu343Ala | missense |
| 1:183954765:A:C | 00000361927.9:c.1026T > G | 00000354960.4:p.Asp342Glu | missense |
| 1:183954767:C:A | 00000361927.9:c.1024G > T | 00000354960.4:p.Asp342Tyr | missense |
| 1:183954767:C:T | 00000361927.9:c.1024G > A | 00000354960.4:p.Asp342Asn | missense |
| 1:183954787:T:A | 00000361927.9:c.1004A > T | 00000354960.4:p.Tyr335Phe | missense |
| 1:183954794:G:A | 00000361927.9:c.997C > T | 00000354960.4:p.Pro333Ser | missense |
| 1:183954797:C:A | 00000361927.9:c.994G > T | 00000354960.4:p.Val332Phe | missense |
| 1:183954799:A:C | 00000361927.9:c.992T > G | 00000354960.4:p.Val331Gly | missense |
| 1:183954799:A:T | 00000361927.9:c.992T > A | 00000354960.4:p.Val331Asp | missense |
| 1:183954805:A:AGGGTTGTCCCTCT | 00000361927.9:c.985_986insAGAGGGACAACCC | 00000354960.4:p.Val329GlufsTer10 | frameshift |
| 1:183954811:T:C | 00000361927.9:c.980A > G | 00000354960.4:p.Gln327Arg | missense |
| 1:183954815:A:G | 00000361927.9:c.976T > C | 00000354960.4:p.Ser326Pro | missense |
| 1:183954820:T:TC | 00000361927.9:c.970dup | 00000354960.4:p.Glu324GlyfsTer11 | frameshift |
| 1:183954824:T:C | 00000361927.9:c.967A > G | 00000354960.4:p.Met323Val | missense |
| 1:183954832:C:T | 00000361927.9:c.959G > A | 00000354960.4:p.Arg320His | missense |
| 1:183954833:G:A | 00000361927.9:c.958C > T | 00000354960.4:p.Arg320Cys | missense |
| 1:183954838:A:G | 00000361927.9:c.953T > C | 00000354960.4:p.Ile318Thr | missense |
| 1:183954838:AC:A | 00000361927.9:c.953-1del | NA | splice |
| | | | acceptor |
| 1:183954840:T:G | 00000361927.9:c.953-2A > C | NA | splice_acceptor |
| 1:183963902:C:T | 00000361927.9:c.951G > A | 00000354960.4:p.Met317Ile | missense |
| 1:183963904:T:C | 00000361927.9:c.949A > G | 00000354960.4:p.Met317Val | missense |
| 1:183963912:A:G | 00000361927.9:c.941T > C | 00000354960.4:p.Ile314Thr | missense |
| 1:183963914:C:A | 00000361927.9:c.939G > T | 00000354960.4:p.Gln313His | missense |
| 1:183963921:T:G | 00000361927.9:c.932A > C | 00000354960.4:p.His311Pro | missense |
| 1:183963930:T:C | 00000361927.9:c.923A > G | 00000354960.4:p.Asn308Ser | missense |
| 1:183963931:T:C | 00000361927.9:c.922A > G | 00000354960.4:p.Asn308Asp | missense |
| 1:183963934:C:T | 00000361927.9:c.919G > A | 00000354960.4:p.Glu307Lys | missense |
| 1:183963940:C:T | 00000361927.9:c.913G > A | 00000354960.4:p.Asp305Asn | missense |
| 1:183963943:C:T | 00000361927.9:c.910G > A | 00000354960.4:p.Glu304Lys | missense |
| 1:183963945:T:TGCAGTGTCTG | 00000361927.9:c.898_907dup | 00000354960.4:p.GIn303ProfsTer16 | frameshift |
| 1:183963951:G:A | 00000361927.9:c.902C > T | 00000354960.4:p.Thr301Ile | missense |
| 1:183963951:G:C | 00000361927.9:c.902C > G | 00000354960.4:p.Thr301Arg | missense |
| 1:183963952:T:C | 00000361927.9:c.901A > G | 00000354960.4:p.Thr301Ala | missense |
| 1:183963957:T:C | 00000361927.9:c.896A > G | 00000354960.4:p.His299Arg | missense |
| 1:183963957:T:G | 00000361927.9:c.896A > C | 00000354960.4:p.His299Pro | missense |
| 1:183963966:A:G | 00000361927.9:c.887T > C | 00000354960.4:p.Leu296Pro | missense |
| 1:183963969:G:A | 00000361927.9:c.884C > T | 00000354960.4:p.Pro295Leu | missense |
| 1:183963972:A:AT | 00000361927.9:c.880dup | 00000354960.4:p.Ile294AsnfsTer22 | frameshift |
| 1:183963981:T:C | 00000361927.9:c.872A > G | 00000354960.4:p.Tyr291Cys | missense |
| 1:183963982:A:G | 00000361927.9:c.871T > C | 00000354960.4:p.Tyr291His | missense |
| 1:183963987:T:C | 00000361927.9:c.866A > G | 00000354960.4:p.Tyr289Cys | missense |
| 1:183963990:T:C | 00000361927.9:c.863A > G | 00000354960.4:p.His288Arg | missense |
| 1:183963994:C:G | 00000361927.9:c.859G > C | 00000354960.4:p.Glu287Gln | missense |
| 1:183963997:T:C | 00000361927.9:c.856A > G | 00000354960.4:p.Arg286Gly | missense |
| 1:183963998:G:C | 00000361927.9:c.855C > G | 00000354960.4:p.Asn285Lys | missense |
| 1:183964009:A:G | 00000361927.9:c.844T > C | 00000354960.4:p.Tyr282His | missense |
| 1:183964015:G:T | 00000361927.9:c.838C > A | 00000354960.4:p.Gln280Lys | missense |
| 1:183964020:C:A | 00000361927.9:c.833G > T | 00000354960.4:p.Gly278Val | missense |
| 1:183964027:A:T | 00000361927.9:c.833-7T > A | NA | splice_region |
| 1:183964033:G:C | 00000361927.9:c.833-13C > G | NA | intronic |
| 1:183964035:G:A | 00000361927.9:c.833-15C > T | NA | intronic |
| 1:183964035:G:T | 00000361927.9:c.833-15C > A | NA | intronic |
| 1:183964036:A:T | 00000361927.9:c.833-16T > A | NA | intronic |
| 1:183964039:G:A | 00000361927.9:c.833-19C > T | NA | intronic |
| 1:183964040:A:C | 00000361927.9:c.833-20T > G | NA | intronic |
| 1:183964046:C:T | 00000361927.9:c.833-26G > A | NA | intronic |
| 1:183964053:T:G | 00000361927.9:c.833-33A > C | NA | intronic |
| 1:183964054:CAG:C | 00000361927.9:c.833-36_833-35del | NA | intronic |
| 1:183964062:A:G | 00000361927.9:c.833-42T > C | NA | intronic |
| 1:183969268:C:A | 00000361927.9:c.832 + 1G > T | NA | splice_donor |
| 1:183969268:C:T | 00000361927.9:c.832 + 1G > A | NA | splice_donor |
| 1:183969279:G:C | 00000361927.9:c.822C > G | 00000354960.4:p.Ser274Arg | missense |
| 1:183969280:C:T | 00000361927.9:c.821G > A | 00000354960.4:p.Ser274Asn | missense |
| 1:183969289:G:A | 00000361927.9:c.812C > T | 00000354960.4:p.Ala271Val | missense |
| 1:183969295:A:G | 00000361927.9:c.806T > C | 00000354960.4:p.Val269Ala | missense |
| 1:183969299:T:A | 00000361927.9:c.802A > T | 00000354960.4:p.Ile268Phe | missense |
| 1:183969302:T:A | 00000361927.9:c.799A > T | 00000354960.4:p.Ile267Phe | missense |
| 1:183969313:G:A | 00000361927.9:c.788C > T | 00000354960.4:p.Thr263Ile | missense |
| 1:183969325:T:A | 00000361927.9:c.776A > T | 00000354960.4:p.Asp259Val | missense |
| 1:183969331:T:C | 00000361927.9:c.770A > G | 00000354960.4:p.His257Arg | missense |
| 1:183969331:T:G | 00000361927.9:c.770A > C | 00000354960.4:p.His257Pro | missense |
| 1:183969332:G:A | 00000361927.9:c.769C > T | 00000354960.4:p.His257Tyr | missense |
| 1:183969332:G:GT | 00000361927.9:c.768dup | 00000354960.4:p.His257ThrfsTer9 | frameshift |
| 1:183969334:G:A | 00000361927.9:c.767C > T | 00000354960.4:p.Pro256Leu | missense |
| 1:183969334:G:C | 00000361927.9:c.767C > G | 00000354960.4:p.Pro256Arg | missense |
| 1:183969334:G:T | 00000361927.9:c.767C > A | 00000354960.4:p.Pro256GIn | missense |
| 1:183969335:G:A | 00000361927.9:c.766C > T | 00000354960.4:p.Pro256Ser | missense |
| 1:183969335:G:C | 00000361927.9:c.766C > G | 00000354960.4:p.Pro256Ala | missense |
| 1:183969338:G:A | 00000361927.9:c.763C > T | 00000354960.4:p.Pro255Ser | missense |
| 1:183969346:G:A | 00000361927.9:c.755C > T | 00000354960.4:p.Thr252Ile | missense |
| 1:183969351:C:A | 00000361927.9:c.750G > T | 00000354960.4:p.Lys250Asn | missense |
| 1:183969355:T:C | 00000361927.9:c.746A > G | 00000354960.4:p.Asp249Gly | missense |
| 1:183969358:G:A | 00000361927.9:c.743C > T | 00000354960.4:p.Ser248Leu | missense |
| 1:183969361:G:A | 00000361927.9:c.740C > T | 00000354960.4:p.Ala247Val | missense |
| 1:183969362:C:A | 00000361927.9:c.739G > T | 00000354960.4:p.Ala247Ser | missense |
| 1:183969363:C:G | 00000361927.9:c.738G > C | 00000354960.4:p.Glu246Asp | missense |
| 1:183969365:C:T | 00000361927.9:c.736G > A | 00000354960.4:p.Glu246Lys | missense |
| 1:183969368:T:C | 00000361927.9:c.733A > G | 00000354960.4:p.Lys245Glu | missense |
| 1:183969374:G:A | 00000361927.9:c.727C > T | 00000354960.4:p.Leu243Phe | missense |
| 1:183969377:C:T | 00000361927.9:c.724G > A | 00000354960.4:p.Asp242Asn | missense |
| 1:183969379:A:G | 00000361927.9:c.722T > C | 00000354960.4:p.Ile241Thr | missense |
| 1:183969389:T:A | 00000361927.9:c.712A > T | 00000354960.4:p.Thr238Ser | missense |
| 1:183969394:T:A | 00000361927.9:c.707A > T | 00000354960.4:p.His236Leu | missense |
| 1:183969394:T:C | 00000361927.9:c.707A > G | 00000354960.4:p.His236Arg | missense |
| 1:183969395:G:T | 00000361927.9:c.706C > A | 00000354960.4:p.His236Asn | missense |
| 1:183969397:A:G | 00000361927.9:c.704T > C | 00000354960.4:p.Val235Ala | missense |
| 1:183969403:G:A | 00000361927.9:c.698C > T | 00000354960.4:p.Pro233Leu | missense |
| 1:183969404:G:C | 00000361927.9:c.697C > G | 00000354960.4:p.Pro233Ala | missense |
| 1:183969406:A:T | 00000361927.9:c.695T > A | 00000354960.4:p.Val232Asp | missense |
| 1:183969407:C:T | 00000361927.9:c.694G > A | 00000354960.4:p.Val232Ile | missense |
| 1:183969411:GA:G | 00000361927.9:c.689del | 00000354960.4:p.Phe230SerfsTer11 | frameshift |
| 1:183969415:C:A | 00000361927.9:c.686G > T | 00000354960.4:p.Cys229Phe | missense |
| 1:183969416:A:C | 00000361927.9:c.685T > G | 00000354960.4:p.Cys229Gly | missense |
| 1:183969418:C:G | 00000361927.9:c.683G > C | 00000354960.4:p.Gly228Ala | missense |
| 1:183969419:C:T | 00000361927.9:c.682G > A | 00000354960.4:p.Gly228Ser | missense |
| 1:183969421:G:A | 00000361927.9:c.680C > T | 00000354960.4:p.Thr227Ile | missense |
| 1:183969424:C:T | 00000361927.9:c.677G > A | 00000354960.4:p.Arg226Lys | missense |
| 1:183969427:T:C | 00000361927.9:c.674A > G | 00000354960.4:p.Lys225Arg | missense |
| 1:183969429:C:G | 00000361927.9:c.672G > C | 00000354960.4:p.Trp224Cys | missense |
| 1:183969431:A:G | 00000361927.9:c.670T > C | 00000354960.4:p.Trp224Arg | missense |
| 1:183969436:C:T | 00000361927.9:c.665G > A | 00000354960.4:p.Arg222Gln | missense |
| 1:183969437:G:A | 00000361927.9:c.664C > T | 00000354960.4:p.Arg222Ter | stop_gained |
| 1:183969437:G:C | 00000361927.9:c.664C > G | 00000354960.4:p.Arg222Gly | missense |
| 1:183969439:A:C | 00000361927.9:c.662T > G | 00000354960.4:p.Ile221Ser | missense |
| 1:183969442:T:G | 00000361927.9:c.659A > C | 00000354960.4:p.GIn220Pro | missense |
| 1:183969445:A:T | 00000361927.9:c.656T > A | 00000354960.4:p.Val219Asp | missense |
| 1:183969446:C:A | 00000361927.9:c.655G > T | 00000354960.4:p.Val219Phe | missense |
| 1:183969446:C:T | 00000361927.9:c.655G > A | 00000354960.4:p.Val219Ile | missense |
| 1:183969449:A:G | 00000361927.9:c.652T > C | 00000354960.4:p.Tyr218His | missense |
| 1:183969451:T:A | 00000361927.9:c.650A > T | 00000354960.4:p.Asp217Val | missense |
| 1:183969451:T:C | 00000361927.9:c.650A > G | 00000354960.4:p.Asp217Gly | missense |
| 1:183969452:C:T | 00000361927.9:c.649G > A | 00000354960.4:p.Asp217Asn | missense |
| 1:183969458:TC:T | 00000361927.9:c.642del | 00000354960.4:p.Thr215ProfsTer26 | frameshift |
| 1:183969463:T:C | 00000361927.9:c.638A > G | 00000354960.4:p.Lys213Arg | missense |
| 1:183969466:T:C | 00000361927.9:c.635A > G | 00000354960.4:p.Tyr212Cys | missense |
| 1:183969468:G:C | 00000361927.9:c.633C > G | 00000354960.4:p.Phe211Leu | missense |
| 1:183969474:C:T | 00000361927.9:c.628-1G > A | NA | splice_acceptor |
| 1:183973614:G:T | 00000361927.9:c.627 + 2C > A | NA | splice_donor |
| 1:183973615:C:T | 00000361927.9:c.627 + 1G > A | NA | splice_donor |
| 1:183973618:T:C | 00000361927.9:c.625A > G | 00000354960.4:p.Lys209Glu | missense |
| 1:183973620:G:C | 00000361927.9:c.623C > G | 00000354960.4:p.Pro208Arg | missense |
| 1:183973623:G:A | 00000361927.9:c.620C > T | 00000354960.4:p.Thr207Ile | missense |
| 1:183973623:G:T | 00000361927.9:c.620C > A | 00000354960.4:p.Thr207Asn | missense |
| 1:183973630:C:T | 00000361927.9:c.613G > A | 00000354960.4:p.Gly205Arg | missense |
| 1:183973632:C:T | 00000361927.9:c.611G > A | 00000354960.4:p.Cys204Tyr | missense |
| 1:183973644:G:C | 00000361927.9:c.599C > G | 00000354960.4:p.Ser200Cys | missense |
| 1:183973652:GC:G | 00000361927.9:c.590del | 00000354960.4:p.Gly197AlafsTer44 | frameshift |
| 1:183973656:C:G | 00000361927.9:c.587G > C | 00000354960.4:p.Arg196Pro | missense |
| 1:183973657:G:A | 00000361927.9:c.586C > T | 00000354960.4:p.Arg196Trp | missense |
| 1:183973660:A:T | 00000361927.9:c.583T > A | 00000354960.4:p.Ser195Thr | missense |
| 1:183973663:C:G | 00000361927.9:c.580G > C | 00000354960.4:p.Glu194GIn | missense |
| 1:183973667:C:T | 00000361927.9:c.576G > A | 00000354960.4:p.Met192Ile | missense |
| 1:183973669:TG:T | 00000361927.9:c.573del | 00000354960.4:p.Met192CysfsTer49 | frameshift |
| 1:183973674:G:T | 00000361927.9:c.569C > A | 00000354960.4:p.Ala190Asp | missense |
| 1:183973675:C:T | 00000361927.9:c.568G > A | 00000354960.4:p.Ala190Thr | missense |
| 1:183973680:A:G | 00000361927.9:c.563T > C | 00000354960.4:p.Ile188Thr | missense |
| 1:183973681:T:G | 00000361927.9:c.562A > C | 00000354960.4:p.Ile188Leu | missense |
| 1:183973687:T:C | 00000361927.9:c.556A > G | 00000354960.4:p.Lys186Glu | missense |
| 1:183973698:A:G | 00000361927.9:c.545T > C | 00000354960.4:p.Ile182Thr | missense |
| 1:183973702:G:C | 00000361927.9:c.541C > G | 00000354960.4:p.Leu181Val | missense |
| 1:183973704:A:G | 00000361927.9:c.539T > C | 00000354960.4:p.Leu180Pro | missense |
| 1:183973708:T:C | 00000361927.9:c.535A > G | 00000354960.4:p.Asn179Asp | missense |
| 1:183973710:A:G | 00000361927.9:c.533T > C | 00000354960.4:p.Leu178Pro | missense |
| 1:183973711:G:A | 00000361927.9:c.532C > T | 00000354960.4:p.Leu178Phe | missense |
| 1:183973713:G:A | 00000361927.9:c.530C > T | 00000354960.4:p.Thr177Ile | missense |
| 1:183973715:C:A | 00000361927.9:c.528G > T | 00000354960.4:p.GIn176His | missense |
| 1:183973716:T:G | 00000361927.9:c.527A > C | 00000354960.4:p.Gln176Pro | missense |
| 1:183973720:G:C | 00000361927.9:c.523C > G | 00000354960.4:p.Pro175Ala | missense |
| 1:183973737:T:A | 00000361927.9:c.506A > T | 00000354960.4:p.Asp169Val | missense |
| 1:183973746:A:G | 00000361927.9:c.497T > C | 00000354960.4:p.Ile166Thr | missense |
| 1:183973749:A:C | 00000361927.9:c.494T > G | 00000354960.4:p.Phe165Cys | missense |
| 1:183973750:AC:A | 00000361927.9:c.493-1del | NA | splice_acceptor |
| 1:183973751:C:G | 00000361927.9:c.493-1G > C | NA | splice_acceptor |
| 1:183973751:C:T | 00000361927.9:c.493-1G > A | NA | splice_acceptor |
| 1:183973752:T:A | 00000361927.9:c.493-2A > T | NA | splice_acceptor |
| 1:183975101:A:G | 00000361927.9:c.488T > C | 00000354960.4:p.Ile163Thr | missense |
| 1:183975103:G:T | 00000361927.9:c.486C > A | 00000354960.4:p.Tyr162Ter | stop_gained |
| 1:183975105:A:T | 00000361927.9:c.484T > A | 00000354960.4:p.Tyr162Asn | missense |
| 1:183975106:G:T | 00000361927.9:c.483C > A | 00000354960.4:p.Asp161Glu | missense |
| 1:183975111:A:C | 00000361927.9:c.478T > G | 00000354960.4:p.Ser160Ala | missense |
| 1:183975112:C:T | 00000361927.9:c.477G > A | 00000354960.4:p.Trp159Ter | stop_gained |
| 1:183975120:C:G | 00000361927.9:c.469G > C | 00000354960.4:p.Glu157GIn | missense |
| 1:183975120:C:T | 00000361927.9:c.469G > A | 00000354960.4:p.Glu157Lys | missense |
| 1:183975122:C:T | 00000361927.9:c.467G > A | 00000354960.4:p.Arg156Lys | missense |
| 1:183975125:G:A | 00000361927.9:c.464C > T | 00000354960.4:p.Ala155Val | missense |
| 1:183975128:G:T | 00000361927.9:c.461C > A | 00000354960.4:p.Thr154Asn | missense |
| 1:183975129:T:C | 00000361927.9:c.460A > G | 00000354960.4:p.Thr154Ala | missense |
| 1:183975131:C:T | 00000361927.9:c.458G > A | 00000354960.4:p.Arg153GIn | missense |
| 1:183975132:G:A | 00000361927.9:c.457C > T | 00000354960.4:p.Arg153Ter | stop_gained |
| 1:183975137:GC:G | 00000361927.9:c.451del | 00000354960.4:p.Ala151ProfsTer16 | frameshift |
| 1:183975138:C:T | 00000361927.9:c.451G > A | 00000354960.4:p.Ala151Thr | missense |
| 1:183975143:T:G | 00000361927.9:c.446A > C | 00000354960.4:p.Gln149Pro | missense |
| 1:183975146:C:T | 00000361927.9:c.443G > A | 00000354960.4:p.Arg148Gln | missense |
| 1:183975147:G:A | 00000361927.9:c.442C > T | 00000354960.4:p.Arg148Ter | stop_gained |
| 1:183975150:G:C | 00000361927.9:c.439C > G | 00000354960.4:p.Leu147Val | missense |
| 1:183975155:A:G | 00000361927.9:c.434T > C | 00000354960.4:p.Met145Thr | missense |
| 1:183975158:A:G | 00000361927.9:c.431T > C | 00000354960.4:p.Val144Ala | missense |
| 1:183975159:C:T | 00000361927.9:c.430G > A | 00000354960.4:p.Val144Met | missense |
| 1:183975161:T:C | 00000361927.9:c.428A > G | 00000354960.4:p.His143Arg | missense |
| 1:183975164:G:A | 00000361927.9:c.425C > T | 00000354960.4:p.Ala142Val | missense |
| 1:183975165:C:T | 00000361927.9:c.424G > A | 00000354960.4:p.Ala142Thr | missense |
| 1:183975170:C:T | 00000361927.9:c.419G > A | 00000354960.4:p.Arg140GIn | missense |
| 1:183975171:G:A | 00000361927.9:c.418C > T | 00000354960.4:p.Arg140Trp | missense |
| 1:183975181:C:T | 00000361927.9:c.408G > A | 00000354960.4:p.Trp136Ter | stop_gained |
| 1:183975192:G:C | 00000361927.9:c.397C > G | 00000354960.4:p.Pro133Ala | missense |
| 1:183975193:TC:T | 00000361927.9:c.395del | 00000354960.4:p.Gly132AspfsTer13 | frameshift |
| 1:183975197:A:G | 00000361927.9:c.392T > C | 00000354960.4:p.Ile131Thr | missense |
| 1:183975202:A:C | 00000361927.9:c.387T > G | 00000354960.4:p.Asp129Glu | missense |
| 1:183975203:T:A | 00000361927.9:c.386A > T | 00000354960.4:p.Asp129Val | missense |
| 1:183975204:C:G | 00000361927.9:c.385G > C | 00000354960.4:p.Asp129His | missense |
| 1:183975206:G:A | 00000361927.9:c.383C > T | 00000354960.4:p.Pro128Leu | missense |
| 1:183975208:G:T | 00000361927.9:c.381C > A | 00000354960.4:p.Tyr127Ter | stop_gained |
| 1:183975210:A:G | 00000361927.9:c.379T > C | 00000354960.4:p.Tyr127His | missense |
| 1:183975213:AC:A | 00000361927.9:c.375del | 00000354960.4:p.Glu125AspfsTer20 | frameshift |
| 1:183978410:T:C | 00000361927.9:c.374A > G | 00000354960.4:p.Glu125Gly | missense |
| 1:183978411:C:T | 00000361927.9:c.373G > A | 00000354960.4:p.Glu125Lys | missense |
| 1:183978412:TG:T | 00000361927.9:c.371del | 00000354960.4:p.Pro124GInfsTer21 | frameshift |
| 1:183978414:G:A | 00000361927.9:c.370C > T | 00000354960.4:p.Pro124Ser | missense |
| 1:183978416:T:A | 00000361927.9:c.368A > T | 00000354960.4:p.Glu123Val | missense |
| 1:183978420:C:T | 00000361927.9:c.364G > A | 00000354960.4:p.Asp122Asn | missense |
| 1:183978423:T:C | 00000361927.9:c.361A > G | 00000354960.4:p.Met121Val | missense |
| 1:183978426:G:T | 00000361927.9:c.358C > A | 00000354960.4:p.Pro120Thr | missense |
| 1:183978438:C:T | 00000361927.9:c.346G > A | 00000354960.4:p.Val116Met | missense |
| 1:183978440:T:C | 00000361927.9:c.344A > G | 00000354960.4:p.Tyr115Cys | missense |
| 1:183978443:T:C | 00000361927.9:c.341A > G | 00000354960.4:p.His114Arg | missense |
| 1:183978446:T:C | 00000361927.9:c.338A > G | 00000354960.4:p.Tyr113Cys | missense |
| 1:183978447:A:G | 00000361927.9:c.337T > C | 00000354960.4:p.Tyr113His | missense |
| 1:183978453:T:C | 00000361927.9:c.331A > G | 00000354960.4:p.Arg111Gly | missense |
| 1:183978454:CTG:C | 00000361927.9:c.328_329del | 00000354960.4:p.GIn110GlufsTer13 | frameshift |
| 1:183978464:T:A | 00000361927.9:c.320A > T | 00000354960.4:p.Lys107Ile | missense |
| 1:183978464:T:G | 00000361927.9:c.320A > C | 00000354960.4:p.Lys107Thr | missense |
| 1:183978465:T:A | 00000361927.9:c.319A > T | 00000354960.4:p.Lys107Ter | stop_gained |
| 1:183978466:C:A | 00000361927.9:c.318G > T | 00000354960.4:p.Leu106Phe | missense |
| 1:183978469:C:T | 00000361927.9:c.315G > A | 00000354960.4:p.Trp105Ter | stop_gained |
| 1:183978470:C:T | 00000361927.9:c.314G > A | 00000354960.4:p.Trp105Ter | stop_gained |
| 1:183978473:T:A | 00000361927.9:c.311A > T | 00000354960.4:p.Glu104Val | missense |
| 1:183978473:T:C | 00000361927.9:c.311A > G | 00000354960.4:p.Glu104Gly | missense |
| 1:183978484:T:G | 00000361927.9:c.300A > C | 00000354960.4:p.Glu100Asp | missense |
| 1:183978486:C:A | 00000361927.9:c.298G > T | 00000354960.4:p.Glu100Ter | stop_gained |
| 1:183978486:C:T | 00000361927.9:c.298G > A | 00000354960.4:p.Glu100Lys | missense |
| 1:183978488:G:T | 00000361927.9:c.296C > A | 00000354960.4:p.Thr99Lys | missense |
| 1:183978491:G:T | 00000361927.9:c.293C > A | 00000354960.4:p.Thr98Lys | missense |
| 1:183978503:T:C | 00000361927.9:c.281A > G | 00000354960.4:p.Asn94Ser | missense |
| 1:183978509:T:A | 00000361927.9:c.275A > T | 00000354960.4:p.Asp92Val | missense |
| 1:183978509:TC:T | 00000361927.9:c.274del | 00000354960.4:p.Asp92IlefsTer15 | frameshift |
| 1:183978515:G:A | 00000361927.9:c.269C > T | 00000354960.4:p.Ala90Val | missense |
| 1:183978515:G:C | 00000361927.9:c.269C > G | 00000354960.4:p.Ala90Gly | missense |
| 1:183978519:C:T | 00000361927.9:c.265G > A | 00000354960.4:p.Ala89Thr | missense |
| 1:183978521:CT:C | 00000361927.9:c.264-2del | NA | splice_acceptor |
| 1:184037096:A:G | 00000361927.9:c.262T > C | 00000354960.4:p.Trp88Arg | missense |
| 1:184037096:A:T | 00000361927.9:c.262T > A | 00000354960.4:p.Trp88Arg | missense |
| 1:184037098:AT:A | 00000361927.9:c.259del | 00000354960.4:p.Ile87SerfsTer20 | frameshift |
| 1:184037101:G:C | 00000361927.9:c.257C > G | 00000354960.4:p.Ala86Gly | missense |
| 1:184037102:C:T | 00000361927.9:c.256G > A | 00000354960.4:p.Ala86Thr | missense |
| 1:184037105:T:A | 00000361927.9:c.253A > T | 00000354960.4:p.Met85Leu | missense |
| 1:184037107:C:T | 00000361927.9:c.251G > A | 00000354960.4:p.Arg84Lys | missense |
| 1:184037109:G:T | 00000361927.9:c.249C > A | 00000354960.4:p.Ser83Arg | missense |
| 1:184037113:T:G | 00000361927.9:c.245A > C | 00000354960.4:p.Lys82Thr | missense |
| 1:184037117:G:C | 00000361927.9:c.241C > G | 00000354960.4:p.Pro81Ala | missense |
| 1:184037120:A:C | 00000361927.9:c.238T > G | 00000354960.4:p.Tyr80Asp | missense |
| 1:184037120:A:G | 00000361927.9:c.238T > C | 00000354960.4:p.Tyr80His | missense |
| 1:184037122:T:G | 00000361927.9:c.236A > C | 00000354960.4:p.Asp79Ala | missense |
| 1:184037128:C:G | 00000361927.9:c.230G > C | 00000354960.4:p.Arg77Pro | missense |
| 1:184037128:C:T | 00000361927.9:c.230G > A | 00000354960.4:p.Arg77GIn | missense |
| 1:184037139:GC:G | 00000361927.9:c.218del | 00000354960.4:p.Gly73AlafsTer34 | frameshift |
| 1:184037141:C:T | 00000361927.9:c.217G > A | 00000354960.4:p.Gly73Ser | missense |
| 1:184037153:G:A | 00000361927.9:c.205C > T | 00000354960.4:p.Pro69Ser | missense |
| 1:184037155:A:G | 00000361927.9:c.203T > C | 00000354960.4:p.Leu68Pro | missense |
| 1:184037158:G:T | 00000361927.9:c.200C > A | 00000354960.4:p.Thr67Lys | missense |
| 1:184037160:G:T | 00000361927.9:c.198C > A | 00000354960.4:p.His66GIn | missense |
| 1:184037161:T:C | 00000361927.9:c.197A > G | 00000354960.4:p.His66Arg | missense |
| 1:184037167:G:C | 00000361927.9:c.191C > G | 00000354960.4:p.Ala64Gly | missense |
| 1:184037168:C:A | 00000361927.9:c.190G > T | 00000354960.4:p.Ala64Ser | missense |
| 1:184037174:G:A | 00000361927.9:c.184C > T | 00000354960.4:p.Arg62Cys | missense |
| 1:184037176:G:A | 00000361927.9:c.182C > T | 00000354960.4:p.Ala61Val | missense |
| 1:184037183:C:T | 00000361927.9:c.175G > A | 00000354960.4:p.Val59Ile | missense |
| 1:184037189:C:G | 00000361927.9:c.169G > C | 00000354960.4:p.Val57Leu | missense |
| 1:184037201:G:A | 00000361927.9:c.157C > T | 00000354960.4:p.Pro53Ser | missense |
| 1:184037203:C:A | 00000361927.9:c.155G > T | 00000354960.4:p.Ser52Ile | missense |
| 1:184037203:C:T | 00000361927.9:c.155G > A | 00000354960.4:p.Ser52Asn | missense |
| 1:184037207:G:A | 00000361927.9:c.151C > T | 00000354960.4:p.Gln51Ter | stop_gained |
| 1:184037207:G:T | 00000361927.9:c.151C > A | 00000354960.4:p.Gln51Lys | missense |
| 1:184037209:A:C | 00000361927.9:c.149T > G | 00000354960.4:p.Leu50Arg | missense |
| 1:184037215:G:T | 00000361927.9:c.143C > A | 00000354960.4:p.Ser48Ter | stop_gained |
| 1:184037217:C:G | 00000361927.9:c.141G > C | 00000354960.4:p.Glu47Asp | missense |
| 1:184037218:T:C | 00000361927.9:c.140A > G | 00000354960.4:p.Glu47Gly | missense |
| 1:184037221:G:T | 00000361927.9:c.137C > A | 00000354960.4:p.Pro46GIn | missense |
| 1:184037222:G:T | 00000361927.9:c.136C > A | 00000354960.4:p.Pro46Thr | missense |
| 1:184037223:GA:G | 00000361927.9:c.134del | 00000354960.4:p.Phe45SerfsTer62 | frameshift |
| 1:184037228:C:G | 00000361927.9:c.130G > C | 00000354960.4:p.Val44Leu | missense |
| 1:184037231:C:T | 00000361927.9:c.127G > A | 00000354960.4:p.Val43Met | missense |
| 1:184037233:G:T | 00000361927.9:c.125C > A | 00000354960.4:p.Pro42Gln | missense |
| 1:184037234:G:C | 00000361927.9:c.124C > G | 00000354960.4:p.Pro42Ala | missense |
| 1:184037239:T:C | 00000361927.9:c.119A > G | 00000354960.4:p.Glu40Gly | missense |
| 1:184037243:C:G | 00000361927.9:c.115G > C | 00000354960.4:p.Gly39Arg | missense |
| 1:184037246:C:T | 00000361927.9:c.112G > A | 00000354960.4:p.Asp38Asn | missense |
| 1:184037260:C:T | 00000361927.9:c.98G > A | 00000354960.4:p.Arg33GIn | missense |
| 1:184037261:G:C | 00000361927.9:c.97C > G | 00000354960.4:p.Arg33Gly | missense |
| 1:184037270:C:T | 00000361927.9:c.88G > A | 00000354960.4:p.Val30Ile | missense |
| 1:184037271:G:T | 00000361927.9:c.87C > A | 00000354960.4:p.Phe29Leu | missense |
| 1:184037275:C:T | 00000361927.9:c.83G > A | 00000354960.4:p.Arg28His | missense |
| 1:184037278:G:A | 00000361927.9:c.80C > T | 00000354960.4:p.Ala27Val | missense |
| 1:184037278:G:T | 00000361927.9:c.80C > A | 00000354960.4:p.Ala27Glu | missense |
| 1:184037281:C:A | 00000361927.9:c.77G > T | 00000354960.4:p.Arg26Leu | missense |
| 1:184037284:C:T | 00000361927.9:c.74G > A | 00000354960.4:p.Cys25Tyr | missense |
| 1:184037285:A:G | 00000361927.9:c.73T > C | 00000354960.4:p.Cys25Arg | missense |
| 1:184037288:C:T | 00000361927.9:c.70G > A | 00000354960.4:p.Gly24Ser | missense |
| 1:184037290:T:A | 00000361927.9:c.68A > T | 00000354960.4:p.Glu23Val | missense |
| 1:184037290:T:C | 00000361927.9:c.68A > G | 00000354960.4:p.Glu23Gly | missense |
| 1:184037291:C:T | 00000361927.9:c.67G > A | 00000354960.4:p.Glu23Lys | missense |
| 1:184037293:C:A | 00000361927.9:c.65G > T | 00000354960.4:p.Arg22Leu | missense |
| 1:184037293:C:T | 00000361927.9:c.65G > A | 00000354960.4:p.Arg22His | missense |
| 1:184037294:G:A | 00000361927.9:c.64C > T | 00000354960.4:p.Arg22Cys | missense |
| 1:184037297:G:A | 00000361927.9:c.61C > T | 00000354960.4:p.Leu21Phe | missense |
| 1:184037303:C:T | 00000361927.9:c.55G > A | 00000354960.4:p.Ala19Thr | missense |
| 1:184037306:A:C | 00000361927.9:c.52T > G | 00000354960.4:p.Ser18Ala | missense |
| 1:184037308:G:A | 00000361927.9:c.50C > T | 00000354960.4:p.Ser17Phe | missense |
| 1:184037308:G:T | 00000361927.9:c.50C > A | 00000354960.4:p.Ser17Tyr | missense |
| 1:184037312:G:A | 00000361927.9:c.46C > T | 00000354960.4:p.Leu16Phe | missense |
| 1:184037312:G:T | 00000361927.9:c.46C > A | 00000354960.4:p.Leu16Ile | missense |
| 1:184037319:T:TCG | 00000361927.9:c.38_39insCG | 00000354960.4:p.Leu14AspfsTer94 | frameshift |
| 1:184037321:G:C | 00000361927.9:c.37C > G | 00000354960.4:p.Leu13Val | missense |
| 1:184037323:G:T | 00000361927.9:c.35C > A | 00000354960.4:p.Ser12Ter | stop_gained |
| 1:184037330:C:G | 00000361927.9:c.28G > C | 00000354960.4:p.Ala10Pro | missense |
| 1:184037330:C:T | 00000361927.9:c.28G > A | 00000354960.4:p.Ala10Thr | missense |
| 1:184037333:G:C | 00000361927.9:c.25C > G | 00000354960.4:p.Leu9Val | missense |
| 1:184037335:G:A | 00000361927.9:c.23C > T | 00000354960.4:p.Thr8Ile | missense |
| 1:184037339:C:A | 00000361927.9:c.19G > T | 00000354960.4:p.Ala7Ser | missense |
| 1:184037339:C:G | 00000361927.9:c.19G > C | 00000354960.4:p.Ala7Pro | missense |
| 1:184037344:G:C | 00000361927.9:c.14C > G | 00000354960.4:p.Pro5Arg | missense |
| 1:184037345:G:A | 00000361927.9:c.13C > T | 00000354960.4:p.Pro5Ser | missense |
| 1:184037347:C:T | 00000361927.9:c.11G > A | 00000354960.4:p.Arg4His | missense |
| 1:184037348:G:C | 00000361927.9:c.10C > G | 00000354960.4:p.Arg4Gly | missense |
| 1:184037350:G:C | 00000361927.9:c.8C > G | 00000354960.4:p.Ala3Gly | missense |
| 1:184037350:G:T | 00000361927.9:c.8C > A | 00000354960.4:p.Ala3Glu | missense |
| 1:184037351:C:T | 00000361927.9:c.7G > A | 00000354960.4:p.Ala3Thr | missense |
| 1:184037356:A:C | 00000361927.9:c.2T > G | 00000354960.4:p.Met1? | start_lost |
| 1:184037356:A:G | 00000361927.9:c.2T > C | 00000354960.4:p.Met1? | start_lost |

[0159] Various modifications of the described subject matter, in addition to those described herein, will be apparent to those skilled in the art from the foregoing description. Such modifications are also intended to fall within the scope of the appended claims. Each reference (including, but not limited to, journal articles, U.S. and non-U.S. patents, patent application publications, international patent application publications, gene bank accession numbers, and the like) cited in the present application is incorporated herein by reference in its entirety and for all purposes.

The application's sequence listing, which the Patent Office published only in electronic form, follows.

SEQUENCE LISTING (2813 sequences)

SEQ ID NO: 1 - RNA, 20 nt, synthetic construct
  source 1..20: mol_type = other RNA
tccctagagccgcgagttgt

SEQ ID NO: 2 - RNA, 20 nt, synthetic construct
  source 1..20: mol_type = other RNA
ttccctagagccgcgagttg

SEQ ID NO: 3 - RNA, 20 nt, synthetic construct
  source 1..20: mol_type = other RNA
cttccctagagccgcgagtt

SEQ ID NO: 4 - RNA, 20 nt, synthetic construct
  source 1..20: mol_type = other RNA
ggtctgtggccttccctaga

SEQ ID NO: 5 - RNA, 20 nt, synthetic construct
  source 1..20: mol_type = other RNA
aggtctgtggccttccctag

SEQ ID NO: 6 - RNA, 20 nt, synthetic construct
  source 1..20: mol_type = other RNA
gaggtctgtggccttcccta

SEQ ID NO: 7 - RNA, 20 nt, synthetic construct
  source 1..20: mol_type = other RNA
tgaggtctgtggccttccct

SEQ ID NO: 8 - RNA, 20 nt, synthetic construct
  source 1..20: mol_type = other RNA
agctgaggtctgtggccttc

SEQ ID NO: 9 - RNA, 20 nt, synthetic construct
  source 1..20: mol_type = other RNA
caggttccgctcgtacagct

SEQ ID NO: 10 - RNA, 20 nt, synthetic construct
  source 1..20: mol_type = other RNA
tccaggttccgctcgtacag

SEQ ID NO: 11 - RNA, 20 nt, synthetic construct
  source 1..20: mol_type = other RNA
gtccaggttccgctcgtaca

SEQ ID NO: 12 - RNA, 20 nt, synthetic construct
  source 1..20: mol_type = other RNA
agtccaggttccgctcgtac

SEQ ID NO: 13 - RNA, 20 nt, synthetic construct
  source 1..20: mol_type = other RNA
tagtccaggttccgctcgta

SEQ ID NO: 14 - RNA, 20 nt, synthetic construct
  source 1..20: mol_type = other RNA
ctagtccaggttccgctcgt

SEQ ID NO: 15 - RNA, 20 nt, synthetic construct
  source 1..20: mol_type = other RNA
tctagtccaggttccgctcg

SEQ ID NO: 16 - RNA, 20 nt, synthetic construct
  source 1..20: mol_type = other RNA
ctctagtccaggttccgctc

SEQ ID NO: 17 - RNA, 20 nt, synthetic construct
  source 1..20: mol_type = other RNA
cctctagtccaggttccgct

SEQ ID NO: 18 - RNA, 20 nt, synthetic construct
  source 1..20: mol_type = other RNA
tcctctagtccaggttccgc

SEQ ID NO: 19 - RNA, 20 nt, synthetic construct
  source 1..20: mol_type = other RNA
ttcctctagtccaggttccg

SEQ ID NO: 20 - RNA, 20 nt, synthetic construct
  source 1..20: mol_type = other RNA
agttcctctagtccaggttc

SEQ ID NO: 21 - RNA, 20 nt, synthetic construct
  source 1..20: mol_type = other RNA
aagttcctctagtccaggtt

SEQ ID NO: 22 - RNA, 20 nt, synthetic construct
  source 1..20: mol_type = other RNA
aaagttcctctagtccaggt

SEQ ID NO: 23 - RNA, 20 nt, synthetic construct
  source 1..20: mol_type = other RNA
gaaagttcctctagtccagg

SEQ ID NO: 24 - RNA, 20 nt, synthetic construct
  source 1..20: mol_type = other RNA
ggaaagttcctctagtccag

SEQ ID NO: 25 - RNA, 20 nt, synthetic construct
  source 1..20: mol_type = other RNA
ctgtgtgccctgagtcctga

SEQ ID NO: 26 - RNA, 20 nt, synthetic construct
  source 1..20: mol_type = other RNA
tcgcagacagtagtggccga

SEQ ID NO: 27 - RNA, 20 nt, synthetic construct
  source 1..20: mol_type = other RNA
tcgggctcgcagacagtagt

SEQ ID NO: 28 - RNA, 20 nt, synthetic construct
  source 1..20: mol_type = other RNA
agaggagcagtagcgaccag

SEQ ID NO: 29 - RNA, 20 nt, synthetic construct
  source 1..20: mol_type = other RNA
gagaggagcagtagcgacca

SEQ ID NO: 30 - RNA, 20 nt, synthetic construct
  source 1..20: mol_type = other RNA
aggagaggagcagtagcgac

SEQ ID NO: 31 - RNA, 20 nt, synthetic construct
  source 1..20: mol_type = other RNA
gaggagaggagcagtagcga

SEQ ID NO: 32 - RNA, 20 nt, synthetic construct
  source 1..20: mol_type = other RNA
gatcagtggctgcccagatg

SEQ ID NO: 33 - RNA, 20 nt, synthetic construct
  source 1..20: mol_type = other RNA
tagtgatagagtctctgtac

SEQ ID NO: 34 - RNA, 20 nt, synthetic construct
  source 1..20: mol_type = other RNA
catagtgatagagtctctgt

SEQ ID NO: 35 - RNA, 20 nt, synthetic construct
  source 1..20: mol_type = other RNA
cacatagtgatagagtctct

SEQ ID NO: 36 - RNA, 20 nt, synthetic construct
  source 1..20: mol_type = other RNA
ccacatagtgatagagtctc

SEQ ID NO: 37 - RNA, 20 nt, synthetic construct
  source 1..20: mol_type = other RNA
ctctggttcatccataggcc

SEQ ID NO: 38 - RNA, 20 nt, synthetic construct
  source 1..20: mol_type = other RNA
actctggttcatccataggc

SEQ ID NO: 39 - RNA, 20 nt, synthetic construct
  source 1..20: mol_type = other RNA
gactctggttcatccatagg

SEQ ID NO: 40 - RNA, 20 nt, synthetic construct
  source 1..20: mol_type = other RNA
agactctggttcatccatag

SEQ ID NO: 41 - RNA, 20 nt, synthetic construct
  source 1..20: mol_type = other RNA
aagactctggttcatccata

SEQ ID NO: 42 - RNA, 20 nt, synthetic construct
  source 1..20: mol_type = other RNA
taagactctggttcatccat

SEQ ID NO: 43 - RNA, 20 nt, synthetic construct
  source 1..20: mol_type = other RNA
gtaagactctggttcatcca

SEQ ID NO: 44 - RNA, 20 nt, synthetic construct
  source 1..20: mol_type = other RNA
ggtaagactctggttcatcc

SEQ ID NO: 45 - RNA, 20 nt, synthetic construct
  source 1..20: mol_type = other RNA
gggtaagactctggttcatc

SEQ ID NO: 46 - RNA, 20 nt, synthetic construct
  source 1..20: mol_type = other RNA
cagggtaagactctggttca

SEQ ID NO: 47 - RNA, 20 nt, synthetic construct
  source 1..20: mol_type = other RNA
tcagggtaagactctggttc

SEQ ID NO: 48 - RNA, 20 nt, synthetic construct
  source 1..20: mol_type = other RNA
atcagggtaagactctggtt

SEQ ID NO: 49 - RNA, 20 nt, synthetic construct
  source 1..20: mol_type = other RNA
catcagggtaagactctggt

SEQ ID NO: 50 - RNA, 20 nt, synthetic construct
  source 1..20: mol_type = other RNA
tcatcagggtaagactctgg

SEQ ID NO: 51 - RNA, 20 nt, synthetic construct
  source 1..20: mol_type = other RNA
ttcatcagggtaagactctg

SEQ ID NO: 52 - RNA, 20 nt, synthetic construct
  source 1..20: mol_type = other RNA
tttcatcagggtaagactct

SEQ ID NO: 53 - RNA, 20 nt, synthetic construct
  source 1..20: mol_type = other RNA
atttcatcagggtaagactc

SEQ ID NO: 54 - RNA, 20 nt, synthetic construct
  source 1..20: mol_type = other RNA
caatttcatcagggtaagac

SEQ ID NO: 55 - RNA, 20 nt, synthetic construct
  source 1..20: mol_type = other RNA
ccaatttcatcagggtaaga

SEQ ID NO: 56 - RNA, 20 nt, synthetic construct
  source 1..20: mol_type = other RNA
tccaatttcatcagggtaag

SEQ ID NO: 57 - RNA, 20 nt, synthetic construct
  source 1..20: mol_type = other RNA
ggtccaatttcatcagggta

SEQ ID NO: 58 - RNA, 20 nt, synthetic construct
  source 1..20: mol_type = other RNA
tggtccaatttcatcagggt

SEQ ID NO: 59 - RNA, 20 nt, synthetic construct
  source 1..20: mol_type = other RNA
ttggtccaatttcatcaggg

SEQ ID NO: 60 - RNA, 20 nt, synthetic construct
  source 1..20: mol_type = other RNA
tgctttggtccaatttcatc

SEQ ID NO: 61 - RNA, 20 nt, synthetic construct
  source 1..20: mol_type = other RNA
gtgctttggtccaatttcat

SEQ ID NO: 62 - RNA, 20 nt, synthetic construct
  source 1..20: mol_type = other RNA
cagtgctttggtccaatttc

SEQ ID NO: 63 - RNA, 20 nt, synthetic construct
  source 1..20: mol_type = other RNA
ccagtgctttggtccaattt

SEQ ID NO: 64 - RNA, 20 nt, synthetic construct
  source 1..20: mol_type = other RNA
gccagtgctttggtccaatt

SEQ ID NO: 65 - RNA, 20 nt, synthetic construct
  source 1..20: mol_type = other RNA
ggccagtgctttggtccaat

SEQ ID NO: 66 - RNA, 20 nt, synthetic construct
  source 1..20: mol_type = other RNA
acatgggcaaaccgggaggt

SEQ ID NO: 67 - RNA, 20 nt, synthetic construct
  source 1..20: mol_type = other RNA
tcacatgggcaaaccgggag

SEQ ID NO: 68 - RNA, 20 nt, synthetic construct
  source 1..20: mol_type = other RNA
atcacatgggcaaaccggga

SEQ ID NO: 69 - RNA, 20 nt, synthetic construct
  source 1..20: mol_type = other RNA
catcacatgggcaaaccggg

SEQ ID NO: 70 - RNA, 20 nt, synthetic construct
  source 1..20: mol_type = other RNA
tcatcacatgggcaaaccgg

SEQ ID NO: 71 - RNA, 20 nt, synthetic construct
  source 1..20: mol_type = other RNA
ttcatcacatgggcaaaccg

SEQ ID NO: 72 - RNA, 20 nt, synthetic construct
  source 1..20: mol_type = other RNA
agtttcatcacatgggcaaa

SEQ ID NO: 73 - RNA, 20 nt, synthetic construct
  source 1..20: mol_type = other RNA
tcgtagtttcatcacatggg

SEQ ID NO: 74 - RNA, 20 nt, synthetic construct
  source 1..20: mol_type = other RNA
gtcgtagtttcatcacatgg

SEQ ID NO: 75 - RNA, 20 nt, synthetic construct
  source 1..20: mol_type = other RNA
tgtcgtagtttcatcacatg

SEQ ID NO: 76 - RNA, 20 nt, synthetic construct
  source 1..20: mol_type = other RNA
ctgtcgtagtttcatcacat

SEQ ID NO: 77 - RNA, 20 nt, synthetic construct
  source 1..20: mol_type = other RNA
cctgtcgtagtttcatcaca

SEQ ID NO: 78 - RNA, 20 nt, synthetic construct
  source 1..20: mol_type = other RNA
gcctgtcgtagtttcatcac

SEQ ID NO: 79 - RNA, 20 nt, synthetic construct
  source 1..20: mol_type = other RNA
tgcctgtcgtagtttcatca

SEQ ID NO: 80 - RNA, 20 nt, synthetic construct
  source 1..20: mol_type = other RNA
ctgcctgtcgtagtttcatc

SEQ ID NO: 81 - RNA, 20 nt, synthetic construct
  source 1..20: mol_type = other RNA
gctgcctgtcgtagtttcat

SEQ ID NO: 82 - RNA, 20 nt, synthetic construct
  source 1..20: mol_type = other RNA
ggctgcctgtcgtagtttca

SEQ ID NO: 83 - RNA, 20 nt, synthetic construct
  source 1..20: mol_type = other RNA
agggctgcctgtcgtagttt

SEQ ID NO: 84 - RNA, 20 nt, synthetic construct
  source 1..20: mol_type = other RNA
aagggctgcctgtcgtagtt

SEQ ID NO: 85 - RNA, 20 nt, synthetic construct
  source 1..20: mol_type = other RNA
gaagggctgcctgtcgtagt

SEQ ID NO: 86 - RNA, 20 nt, synthetic construct
  source 1..20: mol_type = other RNA
tcgaagggctgcctgtcgta

SEQ ID NO: 87 - RNA, 20 nt, synthetic construct
  source 1..20: mol_type = other RNA
ggattagtcaggaaattgtc

SEQ ID NO: 88 - RNA, 20 nt, synthetic construct
  source 1..20: mol_type = other RNA
gtggattagtcaggaaattg

SEQ ID NO: 89 - RNA, 20 nt, synthetic construct
  source 1..20: mol_type = other RNA
gagggtctgtggattagtca

SEQ ID NO: 90 - RNA, 20 nt, synthetic construct
  source 1..20: mol_type = other RNA
tgagggtctgtggattagtc

SEQ ID NO: 91 - RNA, 20 nt, synthetic construct
  source 1..20: mol_type = other RNA
ttgagggtctgtggattagt

SEQ ID NO: 92 - RNA, 20 nt, synthetic construct
  source 1..20: mol_type = other RNA
attgagggtctgtggattag

SEQ ID NO: 93 - RNA, 20 nt, synthetic construct
  source 1..20: mol_type = other RNA
gattgagggtctgtggatta

SEQ ID NO: 94 - RNA, 20 nt, synthetic construct
  source 1..20: mol_type = other RNA
agattgagggtctgtggatt

SEQ ID NO: 95 - RNA, 20 nt, synthetic construct
  source 1..20: mol_type = other RNA
tagattgagggtctgtggat

SEQ ID NO: 96 - RNA, 20 nt, synthetic construct
  source 1..20: mol_type = other RNA
agtagattgagggtctgtgg

SEQ ID NO: 97 - RNA, 20 nt, synthetic construct
  source 1..20: mol_type = other RNA
cagtagattgagggtctgtg

SEQ ID NO: 98 - RNA, 20 nt, synthetic construct
  source 1..20: mol_type = other RNA
tcagtagattgagggtctgt

SEQ ID NO: 99 - RNA, 20 nt, synthetic construct
  source 1..20: mol_type = other RNA
atcagtagattgagggtctg

SEQ ID NO: 100 - RNA, 20 nt, synthetic construct
  source 1..20: mol_type = other RNA
agaaattagaatacaggccc

SEQ ID NO: 101 - RNA, 20 nt, synthetic construct
  source 1..20: mol_type = other RNA
cagaaattagaatacaggcc

SEQ ID NO: 102 - RNA, 20 nt, synthetic construct
  source 1..20: mol_type = other RNA
ccagaaattagaatacaggc

SEQ ID NO: 103 - RNA, 20 nt, synthetic construct
  source 1..20: mol_type = other RNA
cgcaccagaaattagaatac

SEQ ID NO: 104 - RNA, 20 nt, synthetic construct
  source 1..20: mol_type = other RNA
tccgcaccagaaattagaat

SEQ ID NO: 105 - RNA, 20 nt, synthetic construct
  source 1..20: mol_type = other RNA
ttccgcaccagaaattagaa

SEQ ID NO: 106 - RNA, 20 nt, synthetic construct
  source 1..20: mol_type = other RNA
attccgcaccagaaattaga

SEQ ID NO: 107 - RNA, 20 nt, synthetic construct
  source 1..20: mol_type = other RNA
gattccgcaccagaaattag

SEQ ID NO: 108 - RNA, 20 nt, synthetic construct
  source 1..20: mol_type = other RNA
tgattccgcaccagaaatta

SEQ ID NO: 109 - RNA, 20 nt, synthetic construct
  source 1..20: mol_type = other RNA
gtgattccgcaccagaaatt

SEQ ID NO: 110 - RNA, 20 nt, synthetic construct
  source 1..20: mol_type = other RNA
gaatctgaacgtagtctggg

SEQ ID NO: 111 - RNA, 20 nt, synthetic construct
  source 1..20: mol_type = other RNA
cgaatctgaacgtagtctgg

SEQ ID NO: 112 - RNA, 20 nt, synthetic construct
  source 1..20: mol_type = other RNA
tcgaatctgaacgtagtctg

SEQ ID NO: 113 - RNA, 20 nt, synthetic construct
  source 1..20: mol_type = other RNA
ctcgaatctgaacgtagtct

SEQ ID NO: 114 - RNA, 20 nt, synthetic construct
  source 1..20: mol_type = other RNA
ttctcgaatctgaacgtagt

SEQ ID NO: 115 - RNA, 20 nt, synthetic construct
  source 1..20: mol_type = other RNA
attctcgaatctgaacgtag

SEQ ID NO: 116 - RNA, 20 nt, synthetic construct
  source 1..20: mol_type = other RNA
cattctcgaatctgaacgta

SEQ ID NO: 117 - RNA, 20 nt, synthetic construct
  source 1..20: mol_type = other RNA
ccattctcgaatctgaacgt

SEQ ID NO: 118 - RNA, 20 nt, synthetic construct
  source 1..20: mol_type = other RNA
tccattctcgaatctgaacg

SEQ ID NO: 119 - RNA, 20 nt, synthetic construct
  source 1..20: mol_type = other RNA
ttccattctcgaatctgaac

SEQ ID NO: 120 - RNA, 20 nt, synthetic construct
  source 1..20: mol_type = other RNA
cttccattctcgaatctgaa

SEQ ID NO: 121 - RNA, 20 nt, synthetic construct
  source 1..20: mol_type = other RNA
tcttccattctcgaatctga

SEQ ID NO: 122 - RNA, 20 nt, synthetic construct
  source 1..20: mol_type = other RNA
ctcttccattctcgaatctg

SEQ ID NO: 123 - RNA, 20 nt, synthetic construct
  source 1..20: mol_type = other RNA
cctcttccattctcgaatct

SEQ ID NO: 124 - RNA, 20 nt, synthetic construct
  source 1..20: mol_type = other RNA
tcctcttccattctcgaatc

SEQ ID NO: 125 - RNA, 20 nt, synthetic construct
  source 1..20: mol_type = other RNA
agcagcctgtcctcttccat

SEQ ID NO: 126 - RNA, 20 nt, synthetic construct
  source 1..20: mol_type = other RNA
caattaggaaggtggagtgg

SEQ ID NO: 127 - RNA, 20 nt, synthetic construct
  source 1..20: mol_type = other RNA
tcaattaggaaggtggagtg

SEQ ID NO: 128 - RNA, 20 nt, synthetic construct
  source 1..20: mol_type = other RNA
ggtcaattaggaaggtggag

SEQ ID NO: 129 - RNA, 20 nt, synthetic construct
  source 1..20: mol_type = other RNA
aggtcaattaggaaggtgga

SEQ ID NO: 130 - RNA, 20 nt, synthetic construct
  source 1..20: mol_type = other RNA
gaggtcaattaggaaggtgg

SEQ ID NO: 131 - RNA, 20 nt, synthetic construct
  source 1..20: mol_type = other RNA
tgaggtcaattaggaaggtg

SEQ ID NO: 132 - RNA, 20 nt, synthetic construct
  source 1..20: mol_type = other RNA
ctccttcctgaggtcaatta

SEQ ID NO: 133 - RNA, 20 nt, synthetic construct
  source 1..20: mol_type = other RNA
aagtcagcttgtccgaggcc

SEQ ID NO: 134 - RNA, 20 nt, synthetic construct
  source 1..20: mol_type = other RNA
tagaaagtcagcttgtccga

SEQ ID NO: 135 - RNA, 20 nt, synthetic construct
  source 1..20: mol_type = other RNA
gtagaaagtcagcttgtccg

SEQ ID NO: 136 - RNA, 20 nt, synthetic construct
  source 1..20: mol_type = other RNA
catcaaaggtccaggtgtag

SEQ ID NO: 137 - RNA, 20 nt, synthetic construct
  source 1..20: mol_type = other RNA
tcatcaaaggtccaggtgta

SEQ ID NO: 138 - RNA, 20 nt, synthetic construct
  source 1..20: mol_type = other RNA
gtcatcaaaggtccaggtgt

SEQ ID NO: 139 - RNA, 20 nt, synthetic construct
  source 1..20: mol_type = other RNA
tgtcatcaaaggtccaggtg

SEQ ID NO: 140 - RNA, 20 nt, synthetic construct
  source 1..20: mol_type = other RNA
atgtcatcaaaggtccaggt

SEQ ID NO: 141 - RNA, 20 nt, synthetic construct
  source 1..20: mol_type = other RNA
gatgtcatcaaaggtccagg

SEQ ID NO: 142 - RNA, 20 nt, synthetic construct
  source 1..20: mol_type = other RNA
gaaggcaaagacaatgatgt

SEQ ID NO: 143 - RNA, 20 nt, synthetic construct
  source 1..20: mol_type = other RNA
tctggatgcctgcttgcctg

SEQ ID NO: 144 - RNA, 20 nt, synthetic construct
  source 1..20: mol_type = other RNA
atctggatgcctgcttgcct

SEQ ID NO: 145 - RNA, 20 nt, synthetic construct
  source 1..20: mol_type = other RNA
tacatctggatgcctgcttg

SEQ ID NO: 146 - RNA, 20 nt, synthetic construct
  source 1..20: mol_type = other RNA
gtacatctggatgcctgctt

SEQ ID NO: 147 - RNA, 20 nt, synthetic construct
  source 1..20: mol_type = other RNA
ggtacatctggatgcctgct

SEQ ID NO: 148 - RNA, 20 nt, synthetic construct
  source 1..20: mol_type = other RNA
aggtacatctggatgcctgc

SEQ ID NO: 149 - RNA, 20 nt, synthetic construct
  source 1..20: mol_type = other RNA
gaggtacatctggatgcctg

SEQ ID NO: 150 - RNA, 20 nt, synthetic construct
  source 1..20: mol_type = other RNA
agaggtacatctggatgcct

SEQ ID NO: 151 - RNA, 20 nt, synthetic construct
  source 1..20: mol_type = other RNA
catagtgctctctgttgcag

SEQ ID NO: 152 - RNA, 20 nt, synthetic construct
  source 1..20: mol_type = other RNA
ccatagtgctctctgttgca

SEQ ID NO: 153 - RNA, 20 nt, synthetic construct
  source 1..20: mol_type = other RNA
gccatagtgctctctgttgc

SEQ ID NO: 154 - RNA, 20 nt, synthetic construct
  source 1..20: mol_type = other RNA
agccatagtgctctctgttg

SEQ ID NO: 155 - RNA, 20 nt, synthetic construct
  source 1..20: mol_type = other RNA
tagccatagtgctctctgtt

SEQ ID NO: 156 - RNA, 20 nt, synthetic construct
  source 1..20: mol_type = other RNA
gtagccatagtgctctctgt

SEQ ID NO: 157 - RNA, 20 nt, synthetic construct
  source 1..20: mol_type = other RNA
ggtagccatagtgctctctg

SEQ ID NO: 158 - RNA, 20 nt, synthetic construct
  source 1..20: mol_type = other RNA
aggtagccatagtgctctct

SEQ ID NO: 159 - RNA, 20 nt, synthetic construct
  source 1..20: mol_type = other RNA
caggtagccatagtgctctc

SEQ ID NO: 160 - RNA, 20 nt, synthetic construct
  source 1..20: mol_type = other RNA
gcaggtagccatagtgctct

SEQ ID NO: 161 - RNA, 20 nt, synthetic construct
  source 1..20: mol_type = other RNA
ggcaggtagccatagtgctc

SEQ ID NO: 162 - RNA, 20 nt, synthetic construct
  source 1..20: mol_type = other RNA
gggcaggtagccatagtgct

SEQ ID NO: 163 - RNA, 20 nt, synthetic construct
  source 1..20: mol_type = other RNA
tgggcaggtagccatagtgc

SEQ ID NO: 164 - RNA, 20 nt, synthetic construct
  source 1..20: mol_type = other RNA
gttctcgatgtcttcctgca

SEQ ID NO: 165 - RNA, 20 nt, synthetic construct
  source 1..20: mol_type = other RNA
gaggttctcgatgtcttcct

SEQ ID NO: 166 - RNA, 20 nt, synthetic construct
  source 1..20: mol_type = other RNA
tgaggttctcgatgtcttcc

SEQ ID NO: 167 - RNA, 20 nt, synthetic construct
  source 1..20: mol_type = other RNA
atgaggttctcgatgtcttc

SEQ ID NO: 168 - RNA, 20 nt, synthetic construct
  source 1..20: mol_type = other RNA
gatgaggttctcgatgtctt

SEQ ID NO: 169 - RNA, 20 nt, synthetic construct
  source 1..20: mol_type = other RNA
ggatgaggttctcgatgtct

SEQ ID NO: 170 - RNA, 20 nt, synthetic construct
  source 1..20: mol_type = other RNA
tggatgaggttctcgatgtc

SEQ ID NO: 171 - RNA, 20 nt, synthetic construct
  source 1..20: mol_type = other RNA
atggatgaggttctcgatgt

SEQ ID NO: 172 - RNA, 20 nt, synthetic construct
  source 1..20: mol_type = other RNA
catggatgaggttctcgatg

SEQ ID NO: 173 - RNA, 20 nt, synthetic construct
  source 1..20: mol_type = other RNA
acatggatgaggttctcgat

SEQ ID NO: 174 - RNA, 20 nt, synthetic construct
  source 1..20: mol_type = other RNA
cacatggatgaggttctcga

SEQ ID NO: 175 - RNA, 20 nt, synthetic construct
  source 1..20: mol_type = other RNA
gcacatggatgaggttctcg

SEQ ID NO: 176 - RNA, 20 nt, synthetic construct
  source 1..20: mol_type = other RNA
tgcacatggatgaggttctc

SEQ ID NO: 177 - RNA, 20 nt, synthetic construct
  source 1..20: mol_type = other RNA
ctgcacatggatgaggttct

SEQ ID NO: 178 - RNA, 20 nt, synthetic construct
  source 1..20: mol_type = other RNA
tctgcacatggatgaggttc

SEQ ID NO: 179 - RNA, 20 nt, synthetic construct
  source 1..20: mol_type = other RNA
atctgcacatggatgaggtt

SEQ ID NO: 180 - RNA, 20 nt, synthetic construct
  source 1..20: mol_type = other RNA
acggtcaatcattgcttcaa

SEQ ID NO: 181 - RNA, 20 nt, synthetic construct
  source 1..20: mol_type = other RNA
gacggtcaatcattgcttca

SEQ ID NO: 182 - RNA, 20 nt, synthetic construct
  source 1..20: mol_type = other RNA
ggacggtcaatcattgcttc

SEQ ID NO: 183 - RNA, 20 nt, synthetic construct
  source 1..20: mol_type = other RNA
aggacggtcaatcattgctt

SEQ ID NO: 184 - RNA, 20 nt, synthetic construct
  source 1..20: mol_type = other RNA
gaggacggtcaatcattgct

SEQ ID NO: 185 - RNA, 20 nt, synthetic construct
  source 1..20: mol_type = other RNA
ggaggacggtcaatcattgc

SEQ ID NO: 186 - RNA, 20 nt, synthetic construct
  source 1..20: mol_type = other RNA
tggaggacggtcaatcattg

SEQ ID NO: 187 - RNA, 20 nt, synthetic construct
  source 1..20: mol_type = other RNA
ttggaggacggtcaatcatt

SEQ ID NO: 188 - RNA, 20 nt, synthetic construct
  source 1..20: mol_type = other RNA
ttccattggaggacggtcaa

SEQ ID NO: 189 - RNA, 20 nt, synthetic construct
  source 1..20: mol_type = other RNA
gttccattggaggacggtca

SEQ ID NO: 190 - RNA, 20 nt, synthetic construct
  source 1..20: mol_type = other RNA
ggttccattggaggacggtc

SEQ ID NO: 191 - RNA, 20 nt, synthetic construct
  source 1..20: mol_type = other RNA
gggttccattggaggacggt

SEQ ID NO: 192 - RNA, 20 nt, synthetic construct
  source 1..20: mol_type = other RNA
agggttccattggaggacgg

SEQ ID NO: 193 - RNA, 20 nt, synthetic construct
  source 1..20: mol_type = other RNA
gagggttccattggaggacg

SEQ ID NO: 194 - RNA, 20 nt, synthetic construct
  source 1..20: mol_type = other RNA
ggagggttccattggaggac

SEQ ID NO: 195 - RNA, 20 nt, synthetic construct
  source 1..20: mol_type = other RNA
ctgggagggttccattggag

SEQ ID NO: 196 - RNA, 20 nt, synthetic construct
  source 1..20: mol_type = other RNA
actgggagggttccattgga

SEQ ID NO: 197 - RNA, 20 nt, synthetic construct
  source 1..20: mol_type = other RNA
acatactgggagggttccat

SEQ ID NO: 198 - RNA, 20 nt, synthetic construct
  source 1..20: mol_type = other RNA
gacatactgggagggttcca

SEQ ID NO: 199 - RNA, 20 nt, synthetic construct
  source 1..20: mol_type = other RNA
ctgagacatactgggagggt

SEQ ID NO: 200 - RNA, 20 nt, synthetic construct
  source 1..20: mol_type = other RNA
caactgagacatactgggag

SEQ ID NO: 201 - RNA, 20 nt, synthetic construct
  source 1..20: mol_type = other RNA
gggacaactgagacatactg

SEQ ID NO: 202 - RNA, 20 nt, synthetic construct
  source 1..20: mol_type = other RNA
agggacaactgagacatact

SEQ ID NO: 203 - RNA, 20 nt, synthetic construct
  source 1..20: mol_type = other RNA
tagggacaactgagacatac

SEQ ID NO: 204 - RNA, 20 nt, synthetic construct
  source 1..20: mol_type = other RNA
ttagggacaactgagacata

SEQ ID NO: 205 - RNA, 20 nt, synthetic construct
  source 1..20: mol_type = other RNA
tttagggacaactgagacat

SEQ ID NO: 206 - RNA, 20 nt, synthetic construct
  source 1..20: mol_type = other RNA
atttagggacaactgagaca

SEQ ID NO: 207 - RNA, 20 nt, synthetic construct
  source 1..20: mol_type = other RNA
tatttagggacaactgagac

SEQ ID NO: 208 - RNA, 20 nt, synthetic construct
  source 1..20: mol_type = other RNA
ggatatttagggacaactga

SEQ ID NO: 209 - RNA, 20 nt, synthetic construct
  source 1..20: mol_type = other RNA
tggatatttagggacaactg

SEQ ID NO: 210 - RNA, 20 nt, synthetic construct
  source 1..20: mol_type = other RNA
tctggatatttagggacaac

SEQ ID NO: 211 - RNA, 20 nt, synthetic construct
  source 1..20: mol_type = other RNA
cccatcttgtctggatattt

SEQ ID NO: 212 - RNA, 20 nt, synthetic construct
  source 1..20: mol_type = other RNA
tcccatcttgtctggatatt

SEQ ID NO: 213 - RNA, 20 nt, synthetic construct
  source 1..20: mol_type = other RNA
caaatcccatcttgtctgga

SEQ ID NO: 214 - RNA, 20 nt, synthetic construct
  source 1..20: mol_type = other RNA
tcaaatcccatcttgtctgg

SEQ ID NO: 215 - RNA, 20 nt, synthetic construct
  source 1..20: mol_type = other RNA
atcaaatcccatcttgtctg

SEQ ID NO: 216 - RNA, 20 nt, synthetic construct
  source 1..20: mol_type = other RNA
tcatcaaatcccatcttgtc

SEQ ID NO: 217 - RNA, 20 nt, synthetic construct
  source 1..20: mol_type = other RNA
ctcatcaaatcccatcttgt

SEQ ID NO: 218 - RNA, 20 nt, synthetic construct
  source 1..20: mol_type = other RNA
tctcatcaaatcccatcttg

SEQ ID NO: 219 - RNA, 20 nt, synthetic construct
  source 1..20: mol_type = other RNA
tgcgtttgaggtttatcatg

SEQ ID NO: 220 - RNA, 20 nt, synthetic construct
  source 1..20: mol_type = other RNA
ctgcgtttgaggtttatcat

SEQ ID NO: 221 - RNA, 20 nt, synthetic construct
  source 1..20: mol_type = other RNA
tctgcgtttgaggtttatca

SEQ ID NO: 222 - RNA, 20 nt, synthetic construct
  source 1..20: mol_type = other RNA
ttctgcgtttgaggtttatc

SEQ ID NO: 223 - RNA, 20 nt, synthetic construct
  source 1..20: mol_type = other RNA
ctttctgcgtttgaggttta

SEQ ID NO: 224 - RNA, 20 nt, synthetic construct
  source 1..20: mol_type = other RNA
cctttctgcgtttgaggttt

SEQ ID NO: 225 - RNA, 20 nt, synthetic construct
  source 1..20: mol_type = other RNA
tcctttctgcgtttgaggtt

SEQ ID NO: 226 - RNA, 20 nt, synthetic construct
  source 1..20: mol_type = other RNA
gtcctttctgcgtttgaggt

SEQ ID NO: 227 - RNA, 20 nt, synthetic construct
  source 1..20: mol_type = other RNA
tgtcctttctgcgtttgagg

SEQ ID NO: 228 - RNA, 20 nt, synthetic construct
  source 1..20: mol_type = other RNA
ctgtcctttctgcgtttgag

SEQ ID NO: 229 - RNA, 20 nt, synthetic construct
  source 1..20: mol_type = other RNA
cctgtcctttctgcgtttga

SEQ ID NO: 230 - RNA, 20 nt, synthetic construct
  source 1..20: mol_type = other RNA
gcctgtcctttctgcgtttg

SEQ ID NO: 231 - RNA, 20 nt, synthetic construct
  source 1..20: mol_type = other RNA
cgcctgtcctttctgcgttt

SEQ ID NO: 232 - RNA, 20 nt, synthetic construct
  source 1..20: mol_type = other RNA
ccgcctgtcctttctgcgtt

SEQ ID NO: 233 - RNA, 20 nt, synthetic construct
  source 1..20: mol_type = other RNA
ctcaatctcctgttcataca

SEQ ID NO: 234 - RNA, 20 nt, synthetic construct
  source 1..20: mol_type = other RNA
cctcaatctcctgttcatac

SEQ ID NO: 235 - RNA, 20 nt, synthetic construct
  source 1..20: mol_type = other RNA
acctcaatctcctgttcata

SEQ ID NO: 236 - RNA, 20 nt, synthetic construct
  source 1..20: mol_type = other RNA
gacctcaatctcctgttcat

SEQ ID NO: 237 - RNA, 20 nt, synthetic construct
  source 1..20: mol_type = other RNA
tgacctcaatctcctgttca

SEQ ID NO: 238 - RNA, 20 nt, synthetic construct
  source 1..20: mol_type = other RNA
ttgacctcaatctcctgttc

SEQ ID NO: 239 - RNA, 20 nt, synthetic construct
  source 1..20: mol_type = other RNA
cttgacctcaatctcctgtt

SEQ ID NO: 240 - RNA, 20 nt, synthetic construct
  source 1..20: mol_type = other RNA
tcttgacctcaatctcctgt

SEQ ID NO: 241 - RNA, 20 nt, synthetic construct
  source 1..20: mol_type = other RNA
atcttgacctcaatctcctg

SEQ ID NO: 242 - RNA, 20 nt, synthetic construct
  source 1..20: mol_type = other RNA
aatcttgacctcaatctcct

SEQ ID NO: 243 - RNA, 20 nt, synthetic construct
  source 1..20: mol_type = other RNA
acaatcttgacctcaatctc

SEQ ID NO: 244 - RNA, 20 nt, synthetic construct
  source 1..20: mol_type = other RNA
gacaatcttgacctcaatct

SEQ ID NO: 245 - RNA, 20 nt, synthetic construct
  source 1..20: mol_type = other RNA
cgacaatcttgacctcaatc

SEQ ID NO: 246 - RNA, 20 nt, synthetic construct
  source 1..20: mol_type = other RNA
tcgacaatcttgacctcaat

SEQ ID NO: 247 - RNA, 20 nt, synthetic construct
  source 1..20: mol_type = other RNA
ctcgacaatcttgacctcaa

SEQ ID NO: 248 - RNA, 20 nt, synthetic construct
  source 1..20: mol_type = other RNA
cctcgacaatcttgacctca

SEQ ID NO: 249 - RNA, 20 nt, synthetic construct
  source 1..20: mol_type = other RNA
gcctcgacaatcttgacctc

SEQ ID NO: 250 - RNA, 20 nt, synthetic construct
  source 1..20: mol_type = other RNA
agcctcgacaatcttgacct

SEQ ID NO: 251 - RNA, 20 nt, synthetic construct
  source 1..20: mol_type = other RNA
cagcctcgacaatcttgacc

SEQ ID NO: 252 - RNA, 20 nt, synthetic construct
  source 1..20: mol_type = other RNA
acagcctcgacaatcttgac

SEQ ID NO: 253 - RNA, 20 nt, synthetic construct
  source 1..20: mol_type = other RNA
cacagcctcgacaatcttga

SEQ ID NO: 254 - RNA, 20 nt, synthetic construct
  source 1..20: mol_type = other RNA
ccacagcctcgacaatcttg

SEQ ID NO: 255 - RNA, 20 nt, synthetic construct
  source 1..20: mol_type = other RNA
tccacagcctcgacaatctt

SEQ ID NO: 256 - RNA, 20 nt, synthetic construct
  source 1..20: mol_type = other RNA
atccacagcctcgacaatct

SEQ ID NO: 257 - RNA, 20 nt, synthetic construct
  source 1..20: mol_type = other RNA
catccacagcctcgacaatc

SEQ ID NO: 258 - RNA, 20 nt, synthetic construct
  source 1..20: mol_type = other RNA
ccatccacagcctcgacaat

SEQ ID NO: 259 - RNA, 20 nt, synthetic construct
  source 1..20: mol_type = other RNA
cctttccatccacagcctcg

SEQ ID NO: 260 - RNA, 20 nt, synthetic construct
  source 1..20: mol_type = other RNA
gcctttccatccacagcctc

SEQ ID NO: 261 - RNA, 20 nt, synthetic construct
  source 1..20: mol_type = other RNA
tgcctttccatccacagcct

SEQ ID NO: 262 - RNA, 20 nt, synthetic construct
  source 1..20: mol_type = other RNA
gtgcctttccatccacagcc

SEQ ID NO: 263 - RNA, 20 nt, synthetic construct
  source 1..20: mol_type = other RNA
agtgcctttccatccacagc

SEQ ID NO: 264 - RNA, 20 nt, synthetic construct
  source 1..20: mol_type = other RNA
gagtgcctttccatccacag

SEQ ID NO: 265 - RNA, 20 nt, synthetic construct
  source 1..20: mol_type = other RNA
tgagtgcctttccatccaca

SEQ ID NO: 266 - RNA, 20 nt, synthetic construct
  source 1..20: mol_type = other RNA
ttgagtgcctttccatccac

SEQ ID NO: 267 - RNA, 20 nt, synthetic construct
  source 1..20: mol_type = other RNA
gttgagtgcctttccatcca

SEQ ID NO: 268 - RNA, 20 nt, synthetic construct
  source 1..20: mol_type = other RNA
tgttgagtgcctttccatcc

SEQ ID NO: 269 - RNA, 20 nt, synthetic construct
  source 1..20: mol_type = other RNA
gtgttgagtgcctttccatc

SEQ ID NO: 270 - RNA, 20 nt, synthetic construct
  source 1..20: mol_type = other RNA
tgtgttgagtgcctttccat

SEQ ID NO: 271 - RNA, 20 nt, synthetic construct
  source 1..20: mol_type = other RNA
cttgtgttgagtgcctttcc

SEQ ID NO: 272 - RNA, 20 nt, synthetic construct
  source 1..20: mol_type = other RNA
tagccaggcagcatttcaat

SEQ ID NO: 273 - RNA, 20 nt, synthetic construct
  source 1..20: mol_type = other RNA
gatagccaggcagcatttca

SEQ ID NO: 274 - RNA, 20 nt, synthetic construct
  source 1..20: mol_type = other RNA
cgatagccaggcagcatttc

SEQ ID NO: 275 - RNA, 20 nt, synthetic construct
  source 1..20: mol_type = other RNA
tcgatagccaggcagcattt

SEQ ID NO: 276 - RNA, 20 nt, synthetic construct
  source 1..20: mol_type = other RNA
tctcgatagccaggcagcat

SEQ ID NO: 277 - RNA, 20 nt, synthetic construct
  source 1..20: mol_type = other RNA
atctcgatagccaggcagca

SEQ ID NO: 278 - RNA, 20 nt, synthetic construct
  source 1..20: mol_type = other RNA
gatctcgatagccaggcagc

SEQ ID NO: 279 - RNA, 20 nt, synthetic construct
  source 1..20: mol_type = other RNA
ggatctcgatagccaggcag

SEQ ID NO: 280 - RNA, 20 nt, synthetic construct
  source 1..20: mol_type = other RNA
gggatctcgatagccaggca

SEQ ID NO: 281 - RNA, 20 nt, synthetic construct
  source 1..20: mol_type = other RNA
agggatctcgatagccaggc

SEQ ID NO: 282 - RNA, 20 nt, synthetic construct
  source 1..20: mol_type = other RNA
tagggatctcgatagccagg

SEQ ID NO: 283 - RNA, 20 nt, synthetic construct
  source 1..20: mol_type = other RNA
atagggatctcgatagccag

SEQ ID NO: 284 - RNA, 20 nt, synthetic construct
  source 1..20: mol_type = other RNA
aatagggatctcgatagcca

SEQ ID NO: 285 - RNA, 20 nt, synthetic construct
  source 1..20: mol_type = other RNA
gaatagggatctcgatagcc

SEQ ID NO: 286 - RNA, 20 nt, synthetic construct
  source 1..20: mol_type = other RNA
ggaatagggatctcgatagc

SEQ ID NO: 287 - RNA, 20 nt, synthetic construct
  source 1..20: mol_type = other RNA
aggaatagggatctcgatag

SEQ ID NO: 288 - RNA, 20 nt, synthetic construct
  source 1..20: mol_type = other RNA
gaggaatagggatctcgata

SEQ ID NO: 289 - RNA, 20 nt, synthetic construct
  source 1..20: mol_type = other RNA
ggaggaatagggatctcgat

SEQ ID NO: 290 - RNA, 20 nt, synthetic construct
  source 1..20: mol_type = other RNA
tggaggaatagggatctcga

SEQ ID NO: 291 - RNA, 20 nt, synthetic construct
  source 1..20: mol_type = other RNA
ctggaggaatagggatctcg

SEQ ID NO: 292 - RNA, 20 nt, synthetic construct
  source 1..20: mol_type = other RNA
gcctggaggaatagggatct

SEQ ID NO: 293 - RNA, 20 nt, synthetic construct
  source 1..20: mol_type = other RNA
ggcctggaggaatagggatc

SEQ ID NO: 294 - RNA, 20 nt, synthetic construct
  source 1..20: mol_type = other RNA
cgatcaattacctctttcca

SEQ ID NO: 295 - RNA, 20 nt, synthetic construct
  source 1..20: mol_type = other RNA
tcgatcaattacctctttcc

SEQ ID NO: 296 - RNA, 20 nt, synthetic construct
  source 1..20: mol_type = other RNA
ctcgatcaattacctctttc

SEQ ID NO: 297 - RNA, 20 nt, synthetic construct
  source 1..20: mol_type = other RNA
ctctcgatcaattacctctt

SEQ ID NO: 298 - RNA, 20 nt, synthetic construct
  source 1..20: mol_type = other RNA
gctctcgatcaattacctct

SEQ ID NO: 299 - RNA, 20 nt, synthetic construct
  source 1..20: mol_type = other RNA
agctctcgatcaattacctc

SEQ ID NO: 300 - RNA, 20 nt, synthetic construct
  source 1..20: mol_type = other RNA
tagctctcgatcaattacct

SEQ ID NO: 301 - RNA, 20 nt, synthetic construct
  source 1..20: mol_type = other RNA
ctagctctcgatcaattacc

SEQ ID NO: 302 - RNA, 20 nt, synthetic construct
  source 1..20: mol_type = other RNA
tctagctctcgatcaattac

SEQ ID NO: 303 - RNA, 20 nt, synthetic construct
  source 1..20: mol_type = other RNA
ctctagctctcgatcaatta

SEQ ID NO: 304 - RNA, 20 nt, synthetic construct
  source 1..20: mol_type = other RNA
tctctagctctcgatcaatt

SEQ ID NO: 305 - RNA, 20 nt, synthetic construct
  source 1..20: mol_type = other RNA
ttctctagctctcgatcaat

SEQ ID NO: 306 - RNA, 20 nt, synthetic construct
  source 1..20: mol_type = other RNA
cttctctagctctcgatcaa

SEQ ID NO: 307 - RNA, 20 nt, synthetic construct
  source 1..20: mol_type = other RNA
tcttctctagctctcgatca

SEQ ID NO: 308 - RNA, 20 nt, synthetic construct
  source 1..20: mol_type = other RNA
gagtcttctctagctctcga

SEQ ID NO: 309 - RNA, 20 nt, synthetic construct
  source 1..20: mol_type = other RNA
gcacatcgtcttcaattaca

SEQ ID NO: 310 - RNA, 20 nt, synthetic construct
  source 1..20: mol_type = other RNA
cgcacatcgtcttcaattac

SEQ ID NO: 311 - RNA, 20 nt, synthetic construct
  source 1..20: mol_type = other RNA
acgcacatcgtcttcaatta

SEQ ID NO: 312 - RNA, 20 nt, synthetic construct
  source 1..20: mol_type = other RNA
aacgcacatcgtcttcaatt

SEQ ID NO: 313 - RNA, 20 nt, synthetic construct
  source 1..20: mol_type = other RNA
aaacgcacatcgtcttcaat

SEQ ID NO: 314 - RNA, 20 nt, synthetic construct
  source 1..20: mol_type = other RNA
aaaacgcacatcgtcttcaa

SEQ ID NO: 315 - RNA, 20 nt, synthetic construct
  source 1..20: mol_type = other RNA
caaaacgcacatcgtcttca

SEQ ID NO: 316 - RNA, 20 nt, synthetic construct
  source 1..20: mol_type = other RNA
tcaaaacgcacatcgtcttc

SEQ ID NO: 317 - RNA, 20 nt, synthetic construct
  source 1..20: mol_type = other RNA
ctcaaaacgcacatcgtctt

SEQ ID NO: 318 - RNA, 20 nt, synthetic construct
  source 1..20: mol_type = other RNA
gctcaaaacgcacatcgtct

SEQ ID NO: 319 - RNA, 20 nt, synthetic construct
  source 1..20: mol_type = other RNA
atgctcaaaacgcacatcgt

SEQ ID NO: 320 - RNA, 20 nt, synthetic construct
  source 1..20: mol_type = other RNA
ctgatgctcaaaacgcacat

SEQ ID NO: 321 - RNA, 20 nt, synthetic construct
  source 1..20: mol_type = other RNA
actgatgctcaaaacgcaca

SEQ ID NO: 322 - RNA, 20 nt, synthetic construct
  source 1..20: mol_type = other RNA
aactgatgctcaaaacgcac

SEQ ID NO: 323 - RNA, 20 nt, synthetic construct
  source 1..20: mol_type = other RNA
aaactgatgctcaaaacgca

SEQ ID NO: 324 - RNA, 20 nt, synthetic construct
  source 1..20: mol_type = other RNA
tatccatcagcttcatcagc

SEQ ID NO: 325 - RNA, 20 nt, synthetic construct
  source 1..20: mol_type = other RNA
ttatccatcagcttcatcag

SEQ ID NO: 326 - RNA, 20 nt, synthetic construct
  source 1..20: mol_type = other RNA
gttatccatcagcttcatca

SEQ ID NO: 327 - RNA, 20 nt, synthetic construct
  source 1..20: mol_type = other RNA
caatgttatccatcagcttc

SEQ ID NO: 328 - RNA, 20 nt, synthetic construct
  source 1..20: mol_type = other RNA
gtcaatgttatccatcagct

SEQ ID NO: 329 - RNA, 20 nt, synthetic construct
  source 1..20: mol_type = other RNA
tggtcaatgttatccatcag

SEQ ID NO: 330 - RNA, 20 nt, synthetic construct
  source 1..20: mol_type = other RNA
gcctggtcaatgttatccat

SEQ ID NO: 331 - RNA, 20 nt, synthetic construct
  source 1..20: mol_type = other RNA
agcctggtcaatgttatcca

SEQ ID NO: 332 - RNA, 20 nt, synthetic construct
  source 1..20: mol_type = other RNA
gagcctggtcaatgttatcc

SEQ ID NO: 333 - RNA, 20 nt, synthetic construct
  source 1..20: mol_type = other RNA
tgagcctggtcaatgttatc

SEQ ID NO: 334 - RNA, 20 nt, synthetic construct
  source 1..20: mol_type = other RNA
aatcagttcccagtccagct

SEQ ID NO: 335 - RNA, 20 nt, synthetic construct
  source 1..20: mol_type = other RNA
aaatcagttcccagtccagc

SEQ ID NO: 336 - RNA, 20 nt, synthetic construct
  source 1..20: mol_type = other RNA
taaatcagttcccagtccag

SEQ ID NO: 337 - RNA, 20 nt, synthetic construct
  source 1..20: mol_type = other RNA
ataaatcagttcccagtcca

SEQ ID NO: 338 - RNA, 20 nt, synthetic construct
  source 1..20: mol_type = other RNA
catcctcttcctaccaatat

SEQ ID NO: 339 - RNA, 20 nt, synthetic construct
  source 1..20: mol_type = other RNA
tgcatcctcttcctaccaat

SEQ ID NO: 340 - RNA, 20 nt, synthetic construct
  source 1..20: mol_type = other RNA
ttgcatcctcttcctaccaa

SEQ ID NO: 341 - RNA, 20 nt, synthetic construct
  source 1..20: mol_type = other RNA
cttgcatcctcttcctacca

SEQ ID NO: 342 - RNA, 20 nt, synthetic construct
  source 1..20: mol_type = other RNA
acttgcatcctcttcctacc

SEQ ID NO: 343 - RNA, 20 nt, synthetic construct
  source 1..20: mol_type = other RNA
tacttgcatcctcttcctac

SEQ ID NO: 344 - RNA, 20 nt, synthetic construct
  source 1..20: mol_type = other RNA
cctttacttgcatcctcttc

SEQ ID NO: 345 - RNA, 20 nt, synthetic construct
  source 1..20: mol_type = other RNA
ctcctttacttgcatcctct

SEQ ID NO: 346 - RNA, 20 nt, synthetic construct
  source 1..20: mol_type = other RNA
gctcctttacttgcatcctc

SEQ ID NO: 347 - RNA, 20 nt, synthetic construct
  source 1..20: mol_type = other RNA
ggctcctttacttgcatcct

SEQ ID NO: 348 - RNA, 20 nt, synthetic construct
  source 1..20: mol_type = other RNA
ctggctcctttacttgcatc

SEQ ID NO: 349 - RNA, 20 nt, synthetic construct
  source 1..20: mol_type = other RNA
tctggctcctttacttgcat

SEQ ID NO: 350 - RNA, 20 nt, synthetic construct
  source 1..20: mol_type = other RNA
ctctggctcctttacttgca

SEQ ID NO: 351 - RNA, 20 nt, synthetic construct
  source 1..20: mol_type = other RNA
tctctggctcctttacttgc

SEQ ID NO: 352 - RNA, 20 nt, synthetic construct
  source 1..20: mol_type = other RNA
ttctctggctcctttacttg

SEQ ID NO: 353 - RNA, 20 nt, synthetic construct
  source 1..20: mol_type = other RNA
gctttctctggctcctttac

SEQ ID NO: 354 - RNA, 20 nt, synthetic construct
  source 1..20: mol_type = other RNA
acattgggcactgctttctc

SEQ ID NO: 355 - RNA, 20 nt, synthetic construct
  source 1..20: mol_type = other RNA
ccacattgggcactgctttc

SEQ ID NO: 356 - RNA, 20 nt, synthetic construct
  source 1..20: mol_type = other RNA
gccacattgggcactgcttt

SEQ ID NO: 357 - RNA, 20 nt, synthetic construct
  source 1..20: mol_type = other RNA
ccaggtttgccacattgggc

SEQ ID NO: 358 - RNA, 20 nt, synthetic construct
  source 1..20: mol_type = other RNA
accaggtttgccacattggg

SEQ ID NO: 359 - RNA, 20 nt, synthetic construct
  source 1..20: mol_type = other RNA
cagtaggaatagtcggcttc

SEQ ID NO: 360 - RNA, 20 nt, synthetic construct
  source 1..20: mol_type = other RNA
ccagtaggaatagtcggctt

SEQ ID NO: 361 - RNA, 20 nt, synthetic construct
  source 1..20: mol_type = other RNA
ccaaccagcttctgtgctcc

SEQ ID NO: 362 - RNA, 20 nt, synthetic construct
  source 1..20: mol_type = other RNA
tccaaccagcttctgtgctc

SEQ ID NO: 363 - RNA, 20 nt, synthetic construct
  source 1..20: mol_type = other RNA
gattggctccaaccagcttc

SEQ ID NO: 364 - RNA, 20 nt, synthetic construct
  source 1..20: mol_type = other RNA
ggattggctccaaccagctt

SEQ ID NO: 365 - RNA, 20 nt, synthetic construct
  source 1..20: mol_type = other RNA
aaggattggctccaaccagc

SEQ ID NO: 366 - RNA, 20 nt, synthetic construct
  source 1..20: mol_type = other RNA
tccactggcagcatcttccc

SEQ ID NO: 367 - RNA, 20 nt, synthetic construct
  source 1..20: mol_type = other RNA
tcatccactggcagcatctt

SEQ ID NO: 368 - RNA, 20 nt, synthetic construct
  source 1..20: mol_type = other RNA
actcatccactggcagcatc

SEQ ID NO: 369 - RNA, 20 nt, synthetic construct
  source 1..20: mol_type = other RNA
agaaactcatccactggcag

SEQ ID NO: 370 - RNA, 20 nt, synthetic construct
  source 1..20: mol_type = other RNA
ggcagaaactcatccactgg

SEQ ID NO: 371 - RNA, 20 nt, synthetic construct
  source 1..20: mol_type = other RNA
actggcagaaactcatccac

SEQ ID NO: 372 - RNA, 20 nt, synthetic construct
  source 1..20: mol_type = other RNA
gactggcagaaactcatcca

SEQ ID NO: 373 - RNA, 20 nt, synthetic construct
  source 1..20: mol_type = other RNA
tgactggcagaaactcatcc

SEQ ID NO: 374 - RNA, 20 nt, synthetic construct
  source 1..20: mol_type = other RNA
tacatgactggcagaaactc

SEQ ID NO: 375 - RNA, 20 nt, synthetic construct
  source 1..20: mol_type = other RNA
gtacatgactggcagaaact

SEQ ID NO: 376 - RNA, 20 nt, synthetic construct
  source 1..20: mol_type = other RNA
tactccttgtactcggctac

SEQ ID NO: 377 - RNA, 20 nt, synthetic construct
  source 1..20: mol_type = other RNA
atactccttgtactcggcta

SEQ ID NO: 378 - RNA, 20 nt, synthetic construct
  source 1..20: mol_type = other RNA
aatactccttgtactcggct

SEQ ID NO: 379 - RNA, 20 nt, synthetic construct
  source 1..20: mol_type = other RNA
taatactccttgtactcggc

SEQ ID NO: 380 - RNA, 20 nt, synthetic construct
  source 1..20: mol_type = other RNA
cataatactccttgtactcg

SEQ ID NO: 381 - RNA, 20 nt, synthetic construct
  source 1..20: mol_type = other RNA
ccctggattcataatactcc

SEQ ID NO: 382 - RNA, 20 nt, synthetic construct
  source 1..20: mol_type = other RNA
tccctggattcataatactc

SEQ ID NO: 383 - RNA, 20 nt, synthetic construct
  source 1..20: mol_type = other RNA
gtccctggattcataatact

SEQ ID NO: 384 - RNA, 20 nt, synthetic construct
  source 1..20: mol_type = other RNA
ggtccctggattcataatac

SEQ ID NO: 385 - RNA, 20 nt, synthetic construct
  source 1..20: mol_type = other RNA
aggtccctggattcataata

SEQ ID NO: 386 - RNA, 20 nt, synthetic construct
  source 1..20: mol_type = other RNA
caggtccctggattcataat

SEQ ID NO: 387 - RNA, 20 nt, synthetic construct
  source 1..20: mol_type = other RNA
tcaggtccctggattcataa

SEQ ID NO: 388 - RNA, 20 nt, synthetic construct
  source 1..20: mol_type = other RNA
ttcaggtccctggattcata

SEQ ID NO: 389 - RNA, 20 nt, synthetic construct
  source 1..20: mol_type = other RNA
tttcaggtccctggattcat

SEQ ID NO: 390 - RNA, 20 nt, synthetic construct
  source 1..20: mol_type = other RNA
aggctttcaggtccctggat

SEQ ID NO: 391 - RNA, 20 nt, synthetic construct
  source 1..20: mol_type = other RNA
aaggctttcaggtccctgga

SEQ ID NO: 392 - RNA, 20 nt, synthetic construct
  source 1..20: mol_type = other RNA
gaaggctttcaggtccctgg

SEQ ID NO: 393 - RNA, 20 nt, synthetic construct
  source 1..20: mol_type = other RNA
agaaggctttcaggtccctg

SEQ ID NO: 394 - RNA, 20 nt, synthetic construct
  source 1..20: mol_type = other RNA
agatgagcaagggttctgca

SEQ ID NO: 395 - RNA, 20 nt, synthetic construct
  source 1..20: mol_type = other RNA
tagatgagcaagggttctgc

SEQ ID NO: 396 - RNA, 20 nt, synthetic construct
  source 1..20: mol_type = other RNA
gtagatgagcaagggttctg

SEQ ID NO: 397 - RNA, 20 nt, synthetic construct
  source 1..20: mol_type = other RNA
ggtagatgagcaagggttct

SEQ ID NO: 398 - RNA, 20 nt, synthetic construct
  source 1..20: mol_type = other RNA
gggtagatgagcaagggttc

SEQ ID NO: 399 - RNA, 20 nt, synthetic construct
  source 1..20: mol_type = other RNA
tagggtagatgagcaagggt

SEQ ID NO: 400 - RNA, 20 nt, synthetic construct
  source 1..20: mol_type = other RNA
cgtagggtagatgagcaagg

SEQ ID NO: 401 - RNA, 20 nt, synthetic construct
  source 1..20: mol_type = other RNA
gcgtagggtagatgagcaag

SEQ ID NO: 402 - RNA, 20 nt, synthetic construct
  source 1..20: mol_type = other RNA
gtgcgtagggtagatgagca

SEQ ID NO: 403 - RNA, 20 nt, synthetic construct
  source 1..20: mol_type = other RNA
agtgcgtagggtagatgagc

SEQ ID NO: 404 - RNA, 20 nt, synthetic construct
  source 1..20: mol_type = other RNA
tagtgcgtagggtagatgag

SEQ ID NO: 405 - RNA, 20 nt, synthetic construct
  source 1..20: mol_type = other RNA
gtagtgcgtagggtagatga

SEQ ID NO: 406 - RNA, 20 nt, synthetic construct
  source 1..20: mol_type = other RNA
tgtagtgcgtagggtagatg

SEQ ID NO: 407 - RNA, 20 nt, synthetic construct
  source 1..20: mol_type = other RNA
gtgtagtgcgtagggtagat

SEQ ID NO: 408 - RNA, 20 nt, synthetic construct
  source 1..20: mol_type = other RNA
tgtgtagtgcgtagggtaga

SEQ ID NO: 409 - RNA, 20 nt, synthetic construct
  source 1..20: mol_type = other RNA
ctgtgtagtgcgtagggtag

SEQ ID NO: 410 - RNA, 20 nt, synthetic construct
  source 1..20: mol_type = other RNA
cctgtgtagtgcgtagggta

SEQ ID NO: 411 - RNA, 20 nt, synthetic construct
  source 1..20: mol_type = other RNA
gcctgtgtagtgcgtagggt

SEQ ID NO: 412 - RNA, 20 nt, synthetic construct
  source 1..20: mol_type = other RNA
tggcctgtgtagtgcgtagg

SEQ ID NO: 413 - RNA, 20 nt, synthetic construct
  source 1..20: mol_type = other RNA
ctggcctgtgtagtgcgtag

SEQ ID NO: 414 - RNA, 20 nt, synthetic construct
  source 1..20: mol_type = other RNA
gctggcctgtgtagtgcgta

SEQ ID NO: 415 - RNA, 20 nt, synthetic construct
  source 1..20: mol_type = other RNA
tctccgtgtcactcaggtac

SEQ ID NO: 416 - RNA, 20 nt, synthetic construct
  source 1..20: mol_type = other RNA
gtctccgtgtcactcaggta

SEQ ID NO: 417 - RNA, 20 nt, synthetic construct
  source 1..20: mol_type = other RNA
aggtctccgtgtcactcagg

SEQ ID NO: 418 - RNA, 20 nt, synthetic construct
  source 1..20: mol_type = other RNA
gaggtctccgtgtcactcag

SEQ ID NO: 419 - RNA, 20 nt, synthetic construct
  source 1..20: mol_type = other RNA
ggaggtctccgtgtcactca

SEQ ID NO: 420 - RNA, 20 nt, synthetic construct
  source 1..20: mol_type = other RNA
tggaggtctccgtgtcactc

SEQ ID NO: 421 - RNA, 20 nt, synthetic construct
  source 1..20: mol_type = other RNA
tggtggaggtctccgtgtca

SEQ ID NO: 422 - RNA, 20 nt, synthetic construct
  source 1..20: mol_type = other RNA
atggtggaggtctccgtgtc

SEQ ID NO: 423 - RNA, 20 nt, synthetic construct
  source 1..20: mol_type = other RNA
gatggtggaggtctccgtgt

SEQ ID NO: 424 - RNA, 20 nt, synthetic construct
  source 1..20: mol_type = other RNA
cagatggtggaggtctccgt

SEQ ID NO: 425 - RNA, 20 nt, synthetic construct
  source 1..20: mol_type = other RNA
attgtcccagatggtggagg

SEQ ID NO: 426 - RNA, 20 nt, synthetic construct
  source 1..20: mol_type = other RNA
gtctcattgtcccagatggt

SEQ ID NO: 427 - RNA, 20 nt, synthetic construct
  source 1..20: mol_type = other RNA
ctgtctcattgtcccagatg

SEQ ID NO: 428 - RNA, 20 nt, synthetic construct
  source 1..20: mol_type = other RNA
actgtctcattgtcccagat

SEQ ID NO: 429 - RNA, 20 nt, synthetic construct
  source 1..20: mol_type = other RNA
cactgtctcattgtcccaga

SEQ ID NO: 430 - RNA, 20 nt, synthetic construct
  source 1..20: mol_type = other RNA
ccactgtctcattgtcccag

SEQ ID NO: 431 - RNA, 20 nt, synthetic construct
  source 1..20: mol_type = other RNA
tgtcctatcccagtcggtgg

SEQ ID NO: 432 - RNA, 20 nt, synthetic construct
  source 1..20: mol_type = other RNA
gtgtcctatcccagtcggtg

SEQ ID NO: 433 - RNA, 20 nt, synthetic construct
  source 1..20: mol_type = other RNA
tgtgtcctatcccagtcggt

SEQ ID NO: 434 - RNA, 20 nt, synthetic construct
  source 1..20: mol_type = other RNA
atgtgtcctatcccagtcgg

SEQ ID NO: 435 - RNA, 20 nt, synthetic construct
  source 1..20: mol_type = other RNA
catgtgtcctatcccagtcg

SEQ ID NO: 436 - RNA, 20 nt, synthetic construct
  source 1..20: mol_type = other RNA
gcatgtgtcctatcccagtc

SEQ ID NO: 437 - RNA, 20 nt, synthetic construct
  source 1..20: mol_type = other RNA
ggcatgtgtcctatcccagt

SEQ ID NO: 438 - RNA, 20 nt, synthetic construct
  source 1..20: mol_type = other RNA
aggcatgtgtcctatcccag

SEQ ID NO: 439 - RNA, 20 nt, synthetic construct
  source 1..20: mol_type = other RNA
caggcatgtgtcctatccca

SEQ ID NO: 440 - RNA, 20 nt, synthetic construct
  source 1..20: mol_type = other RNA
ccaggcatgtgtcctatccc

SEQ ID NO: 441 - RNA, 20 nt, synthetic construct
  source 1..20: mol_type = other RNA
tccaggcatgtgtcctatcc

SEQ ID NO: 442 - RNA, 20 nt, synthetic construct
  source 1..20: mol_type = other RNA
cttccaggcatgtgtcctat

SEQ ID NO: 443 - RNA, 20 nt, synthetic construct
  source 1..20: mol_type = other RNA
cgggacttccaggcatgtgt

SEQ ID NO: 444 - RNA, 20 nt, synthetic construct
  source 1..20: mol_type = other RNA
tccgggacttccaggcatgt

SEQ ID NO: 445 - RNA, 20 nt, synthetic construct
  source 1..20: mol_type = other RNA
cttccgggacttccaggcat

SEQ ID NO: 446 - RNA, 20 nt, synthetic construct
  source 1..20: mol_type = other RNA
ttgcttccgggacttccagg

SEQ ID NO: 447 - RNA, 20 nt, synthetic construct
  source 1..20: mol_type = other RNA
ctttgcttccgggacttcca

SEQ ID NO: 448 - RNA, 20 nt, synthetic construct
  source 1..20: mol_type = other RNA
gctttgcttccgggacttcc

SEQ ID NO: 449 - RNA, 20 nt, synthetic construct
  source 1..20: mol_type = other RNA
ggctttgcttccgggacttc

SEQ ID NO: 450 - RNA, 20 nt, synthetic construct
  source 1..20: mol_type = other RNA
cggctttgcttccgggactt

SEQ ID NO: 451 - RNA, 20 nt, synthetic construct
  source 1..20: mol_type = other RNA
atgcggctttgcttccggga

SEQ ID NO: 452 - RNA, 20 nt, synthetic construct
  source 1..20: mol_type = other RNA
agatgcggctttgcttccgg

SEQ ID NO: 453 - RNA, 20 nt, synthetic construct
  source 1..20: mol_type = other RNA
tagatgcggctttgcttccg

SEQ ID NO: 454 - RNA, 20 nt, synthetic construct
  source 1..20: mol_type = other RNA
gtagatgcggctttgcttcc

SEQ ID NO: 455 - RNA, 20 nt, synthetic construct
  source 1..20: mol_type = other RNA
tgtagatgcggctttgcttc

SEQ ID NO: 456 - RNA, 20 nt, synthetic construct
  source 1..20: mol_type = other RNA
tgctgtagatgcggctttgc

SEQ ID NO: 457 - RNA, 20 nt, synthetic construct
  source 1..20: mol_type = other RNA
ttgctgtagatgcggctttg

SEQ ID NO: 458 - RNA, 20 nt, synthetic construct
  source 1..20: mol_type = other RNA
attgctgtagatgcggcttt

SEQ ID NO: 459 - RNA, 20 nt, synthetic construct
  source 1..20: mol_type = other RNA
cattgctgtagatgcggctt

SEQ ID NO: 460 - RNA, 20 nt, synthetic construct
  source 1..20: mol_type = other RNA
tcttggcattgctgtagatg

SEQ ID NO: 461 - RNA, 20 nt, synthetic construct
  source 1..20: mol_type = other RNA
ttcttggcattgctgtagat

SEQ ID NO: 462 - RNA, 20 nt, synthetic construct
  source 1..20: mol_type = other RNA
ctctgtgttcttggcattgc

SEQ ID NO: 463 - RNA, 20 nt, synthetic construct
  source 1..20: mol_type = other RNA
agggcctctgtgttcttggc

SEQ ID NO: 464 - RNA, 20 nt, synthetic construct
  source 1..20: mol_type = other RNA
cacagtgtccagggaggttg

SEQ ID NO: 465 - RNA, 20 nt, synthetic construct
  source 1..20: mol_type = other RNA
gcacagtgtccagggaggtt

SEQ ID NO: 466 - RNA, 20 nt, synthetic construct
  source 1..20: mol_type = other RNA
aaggcacagtgtccagggag

SEQ ID NO: 467 - RNA, 20 nt, synthetic construct
  source 1..20: mol_type = other RNA
tgaaggcacagtgtccaggg

SEQ ID NO: 468 - RNA, 20 nt, synthetic construct
  source 1..20: mol_type = other RNA
ttgaaggcacagtgtccagg

SEQ ID NO: 469 - RNA, 20 nt, synthetic construct
  source 1..20: mol_type = other RNA
cccttgaaggcacagtgtcc

SEQ ID NO: 470 - RNA, 20 nt, synthetic construct
  source 1..20: mol_type = other RNA
atcccttgaaggcacagtgt

SEQ ID NO: 471 - RNA, 20 nt, synthetic construct
  source 1..20: mol_type = other RNA
tcatcccttgaaggcacagt

SEQ ID NO: 472 - RNA, 20 nt, synthetic construct
  source 1..20: mol_type = other RNA
ctcatcccttgaaggcacag

SEQ ID NO: 473 - RNA, 20 nt, synthetic construct
  source 1..20: mol_type = other RNA
gctcatcccttgaaggcaca

SEQ ID NO: 474 - RNA, 20 nt, synthetic construct
  source 1..20: mol_type = other RNA
agctcatcccttgaaggcac

SEQ ID NO: 475 - RNA, 20 nt, synthetic construct
  source 1..20: mol_type = other RNA
tagctcatcccttgaaggca

SEQ ID NO: 476 - RNA, 20 nt, synthetic construct
  source 1..20: mol_type = other RNA
atagctcatcccttgaaggc

SEQ ID NO: 477 - RNA, 20 nt, synthetic construct
  source 1..20: mol_type = other RNA
cttcatagctcatcccttga

SEQ ID NO: 478 - RNA, 20 nt, synthetic construct
  source 1..20: mol_type = other RNA
gttgaactgatgtgggccac

SEQ ID NO: 479 - RNA, 20 nt, synthetic construct
  source 1..20: mol_type = other RNA
tgttgaactgatgtgggcca

SEQ ID NO: 480 - RNA, 20 nt, synthetic construct
  source 1..20: mol_type = other RNA
atgttgaactgatgtgggcc

SEQ ID NO: 481 - RNA, 20 nt, synthetic construct
  source 1..20: mol_type = other RNA
gatgttgaactgatgtgggc

SEQ ID NO: 482 - RNA, 20 nt, synthetic construct
  source 1..20: mol_type = other RNA
ggatgttgaactgatgtggg

SEQ ID NO: 483 - RNA, 20 nt, synthetic construct
  source 1..20: mol_type = other RNA
ccagaggatgttgaactgat

SEQ ID NO: 484 - RNA, 20 nt, synthetic construct
  source 1..20: mol_type = other RNA
accagaggatgttgaactga

SEQ ID NO: 485 - RNA, 20 nt, synthetic construct
  source 1..20: mol_type = other RNA
aaccagaggatgttgaactg

SEQ ID NO: 486 - RNA, 20 nt, synthetic construct
  source 1..20: mol_type = other RNA
aaaccagaggatgttgaact

SEQ ID NO: 487 - RNA, 20 nt, synthetic construct
  source 1..20: mol_type = other RNA
aaaaccagaggatgttgaac

SEQ ID NO: 488 - RNA, 20 nt, synthetic construct
  source 1..20: mol_type = other RNA
ctggagcaaacagatgaata

SEQ ID NO: 489 - RNA, 20 nt, synthetic construct
  source 1..20: mol_type = other RNA
actggagcaaacagatgaat

SEQ ID NO: 490 - RNA, 20 nt, synthetic construct
  source 1..20: mol_type = other RNA
ctgtgaccactaagaacaaa

SEQ ID NO: 491 - RNA, 20 nt, synthetic construct
  source 1..20: mol_type = other RNA
tgactgtgaccactaagaac

SEQ ID NO: 492 - RNA, 20 nt, synthetic construct
  source 1..20: mol_type = other RNA
gatgactgtgaccactaaga

SEQ ID NO: 493 - RNA, 20 nt, synthetic construct
  source 1..20: mol_type = other RNA
agatgactgtgaccactaag

SEQ ID NO: 494 - RNA, 20 nt, synthetic construct
  source 1..20: mol_type = other RNA
tagatgactgtgaccactaa

SEQ ID NO: 495 - RNA, 20 nt, synthetic construct
  source 1..20: mol_type = other RNA
ttagatgactgtgaccacta

SEQ ID NO: 496 - RNA, 20 nt, synthetic construct
  source 1..20: mol_type = other RNA
gttagatgactgtgaccact

SEQ ID NO: 497 - RNA, 20 nt, synthetic construct
  source 1..20: mol_type = other RNA
ggttagatgactgtgaccac

SEQ ID NO: 498 - RNA, 20 nt, synthetic construct
  source 1..20: mol_type = other RNA
ttggttagatgactgtgacc

SEQ ID NO: 499 - RNA, 20 nt, synthetic construct
  source 1..20: mol_type = other RNA
tttggttagatgactgtgac

SEQ ID NO: 500 - RNA, 20 nt, synthetic construct
  source 1..20: mol_type = other RNA
actttggttagatgactgtg

SEQ ID NO: 501 - RNA, 20 nt, synthetic construct
  source 1..20: mol_type = other RNA
gatcactttggttagatgac

SEQ ID NO: 502 - RNA, 20 nt, synthetic construct
  source 1..20: mol_type = other RNA
cacactagatcactttggtt

SEQ ID NO: 503 - RNA, 20 nt, synthetic construct
  source 1..20: mol_type = other RNA
ttcagccgtcttgggaaatt

SEQ ID NO: 504 - RNA, 20 nt, synthetic construct
  source 1..20: mol_type = other RNA
tctttcagccgtcttgggaa

SEQ ID NO: 505 - RNA, 20 nt, synthetic construct
  source 1..20: mol_type = other RNA
gtctttcagccgtcttggga

SEQ ID NO: 506 - RNA, 20 nt, synthetic construct
  source 1..20: mol_type = other RNA
tgtctttcagccgtcttggg

SEQ ID NO: 507 - RNA, 20 nt, synthetic construct
  source 1..20: mol_type = other RNA
ctgtctttcagccgtcttgg

SEQ ID NO: 508 - RNA, 20 nt, synthetic construct
  source 1..20: mol_type = other RNA
ttaggtgtctggattacagt

SEQ ID NO: 509 - RNA, 20 nt, synthetic construct
  source 1..20: mol_type = other RNA
attaggtgtctggattacag

SEQ ID NO: 510 - RNA, 20 nt, synthetic construct
  source 1..20: mol_type = other RNA
gaagaattaggtgtctggat

SEQ ID NO: 511 - RNA, 20 nt, synthetic construct
  source 1..20: mol_type = other RNA
tgaagaattaggtgtctgga

SEQ ID NO: 512 - RNA, 20 nt, synthetic construct
  source 1..20: mol_type = other RNA
catgagtagtgaactgaaga

SEQ ID NO: 513 - RNA, 20 nt, synthetic construct
  source 1..20: mol_type = other RNA
acatgagtagtgaactgaag

SEQ ID NO: 514 - RNA, 20 nt, synthetic construct
  source 1..20: mol_type = other RNA
cacatgagtagtgaactgaa

SEQ ID NO: 515 - RNA, 20 nt, synthetic construct
  source 1..20: mol_type = other RNA
tcagtatcacatgagtagtg

SEQ ID NO: 516 - RNA, 20 nt, synthetic construct
  source 1..20: mol_type = other RNA
tgggaatcagtatcacatga

SEQ ID NO: 517 - RNA, 20 nt, synthetic construct
  source 1..20: mol_type = other RNA
gtgggaatcagtatcacatg

SEQ ID NO: 518 - RNA, 20 nt, synthetic construct
  source 1..20: mol_type = other RNA
ccttaatgtgggaatcagta

SEQ ID NO: 519 - RNA, 20 nt, synthetic construct
  source 1..20: mol_type = other RNA
accttaatgtgggaatcagt

SEQ ID NO: 520 - RNA, 20 nt, synthetic construct
  source 1..20: mol_type = other RNA
gttcaaccttaatgtgggaa

SEQ ID NO: 521 - RNA, 20 nt, synthetic construct
  source 1..20: mol_type = other RNA
gttgttcaaccttaatgtgg

SEQ ID NO: 522 - RNA, 20 nt, synthetic construct
  source 1..20: mol_type = other RNA
gatgtgacagctcggtgatc

SEQ ID NO: 523 - RNA, 20 nt, synthetic construct
  source 1..20: mol_type = other RNA
tgatgtgacagctcggtgat

SEQ ID NO: 524 - RNA, 20 nt, synthetic construct
  source 1..20: mol_type = other RNA
ctgatgtgacagctcggtga

SEQ ID NO: 525 - RNA, 20 nt, synthetic construct
  source 1..20: mol_type = other RNA
catatttgctgatgtgacag

SEQ ID NO: 526 - RNA, 20 nt, synthetic construct
  source 1..20: mol_type = other RNA
gccttgactacatatttgct

SEQ ID NO: 527 - RNA, 20 nt, synthetic construct
  source 1..20: mol_type = other RNA
tgccttgactacatatttgc

SEQ ID NO: 528 - RNA, 20 nt, synthetic construct
  source 1..20: mol_type = other RNA
caataagtgtggtctagttg

SEQ ID NO: 529 - RNA, 20 nt, synthetic construct
  source 1..20: mol_type = other RNA
ggacaaactagaccaataag

SEQ ID NO: 530 - RNA, 20 nt, synthetic construct
  source 1..20: mol_type = other RNA
cggacaaactagaccaataa

SEQ ID NO: 531 - RNA, 20 nt, synthetic construct
  source 1..20: mol_type = other RNA
acggacaaactagaccaata

SEQ ID NO: 532 - RNA, 20 nt, synthetic construct
  source 1..20: mol_type = other RNA
aacggacaaactagaccaat

SEQ ID NO: 533 - RNA, 20 nt, synthetic construct
  source 1..20: mol_type = other RNA
aaacggacaaactagaccaa

SEQ ID NO: 534 - RNA, 20 nt, synthetic construct
  source 1..20: mol_type = other RNA
aaaacggacaaactagacca

SEQ ID NO: 535 - RNA, 20 nt, synthetic construct
  source 1..20: mol_type = other RNA
gcacacacaagttttcaatg

SEQ ID NO: 536 - RNA, 20 nt, synthetic construct
  source 1..20: mol_type = other RNA
ccaaaagttgcacacacaag

SEQ ID NO: 537 - RNA, 20 nt, synthetic construct
  source 1..20: mol_type = other RNA
gacttgtgacagaatccttt

SEQ ID NO: 538 - RNA, 20 nt, synthetic construct
  source 1..20: mol_type = other RNA
aagacttgtgacagaatcct

SEQ ID NO: 539 - RNA, 20 nt, synthetic construct
  source 1..20: mol_type = other RNA
taagacttgtgacagaatcc

SEQ ID NO: 540 - RNA, 20 nt, synthetic construct
  source 1..20: mol_type = other RNA
ggataacagggactaagatt

SEQ ID NO: 541 - RNA, 20 nt, synthetic construct
  source 1..20: mol_type = other RNA
tggataacagggactaagat

SEQ ID NO: 542 - RNA, 20 nt, synthetic construct
  source 1..20: mol_type = other RNA
ctggataacagggactaaga

SEQ ID NO: 543 - RNA, 20 nt, synthetic construct
  source 1..20: mol_type = other RNA
tgccatgatggtcacaggcc

SEQ ID NO: 544 - RNA, 20 nt, synthetic construct
  source 1..20: mol_type = other RNA
ctgccatgatggtcacaggc

SEQ ID NO: 545 - RNA, 20 nt, synthetic construct
  source 1..20: mol_type = other RNA
caactgccatgatggtcaca

SEQ ID NO: 546 - RNA, 20 nt, synthetic construct
  source 1..20: mol_type = other RNA
ccaactgccatgatggtcac

SEQ ID NO: 547 - RNA, 20 nt, synthetic construct
  source 1..20: mol_type = other RNA
tccaactgccatgatggtca

SEQ ID NO: 548 - RNA, 20 nt, synthetic construct
  source 1..20: mol_type = other RNA
ctccaactgccatgatggtc

SEQ ID NO: 549 - RNA, 20 nt, synthetic construct
  source 1..20: mol_type = other RNA
ctggtcacctctatatgaga

SEQ ID NO: 550 - RNA, 20 nt, synthetic construct
  source 1..20: mol_type = other RNA
actggtcacctctatatgag

SEQ ID NO: 551 - RNA, 20 nt, synthetic construct
  source 1..20: mol_type = other RNA
aaactggtcacctctatatg

SEQ ID NO: 552 - RNA, 20 nt, synthetic construct
  source 1..20: mol_type = other RNA
tggcaaactggtcacctcta

SEQ ID NO: 553 - RNA, 20 nt, synthetic construct
  source 1..20: mol_type = other RNA
atggcaaactggtcacctct

SEQ ID NO: 554 - RNA, 20 nt, synthetic construct
  source 1..20: mol_type = other RNA
catggcaaactggtcacctc

SEQ ID NO: 555 - RNA, 20 nt, synthetic construct
  source 1..20: mol_type = other RNA
acatggcaaactggtcacct

SEQ ID NO: 556 - RNA, 20 nt, synthetic construct
  source 1..20: mol_type = other RNA
cacatggcaaactggtcacc

SEQ ID NO: 557 - RNA, 20 nt, synthetic construct
  source 1..20: mol_type = other RNA
ccacatggcaaactggtcac

SEQ ID NO: 558 - RNA, 20 nt, synthetic construct
  source 1..20: mol_type = other RNA
tccacatggcaaactggtca

SEQ ID NO: 559 - RNA, 20 nt, synthetic construct
  source 1..20: mol_type = other RNA
atccacatggcaaactggtc

SEQ ID NO: 560 - RNA, 20 nt, synthetic construct
  source 1..20: mol_type = other RNA
tatatccacatggcaaactg

SEQ ID NO: 561 - RNA, 20 nt, synthetic construct
  source 1..20: mol_type = other RNA
cctcaaatacctacacaaac

SEQ ID NO: 562 - RNA, 20 nt, synthetic construct
  source 1..20: mol_type = other RNA
tttccctcaaatacctacac

SEQ ID NO: 563 - RNA, 20 nt, synthetic construct
  source 1..20: mol_type = other RNA
aatagagcatcctgactcga

SEQ ID NO: 564 - RNA, 20 nt, synthetic construct
  source 1..20: mol_type = other RNA
aaatagagcatcctgactcg

SEQ ID NO: 565 - RNA, 20 nt, synthetic construct
  source 1..20: mol_type = other RNA
ccagtcctcaccctttatat

SEQ ID NO: 566 - RNA, 20 nt, synthetic construct
  source 1..20: mol_type = other RNA
acagccagtcctcacccttt

SEQ ID NO: 567 - RNA, 20 nt, synthetic construct
  source 1..20: mol_type = other RNA
gatgcacagccagtcctcac

SEQ ID NO: 568 - RNA, 20 nt, synthetic construct
  source 1..20: mol_type = other RNA
tgaagctctgtagcagcgcg

SEQ ID NO: 569 - RNA, 20 nt, synthetic construct
  source 1..20: mol_type = other RNA
gtgaagctctgtagcagcgc

SEQ ID NO: 570 - RNA, 20 nt, synthetic construct
  source 1..20: mol_type = other RNA
cgtgaagctctgtagcagcg

SEQ ID NO: 571 - RNA, 20 nt, synthetic construct
  source 1..20: mol_type = other RNA
ctgaaaatgtgctctgtctc

SEQ ID NO: 572 - RNA, 20 nt, synthetic construct
  source 1..20: mol_type = other RNA
gcctgaaaatgtgctctgtc

SEQ ID NO: 573 - RNA, 20 nt, synthetic construct
  source 1..20: mol_type = other RNA
caatatcttcgcccattttg

SEQ ID NO: 574 - RNA, 20 nt, synthetic construct
  source 1..20: mol_type = other RNA
gacaatatcttcgcccattt

SEQ ID NO: 575 - RNA, 20 nt, synthetic construct
  source 1..20: mol_type = other RNA
agacaatatcttcgcccatt

SEQ ID NO: 576 - RNA, 20 nt, synthetic construct
  source 1..20: mol_type = other RNA
ggaagtctgcaacatctgtt

SEQ ID NO: 577 - RNA, 20 nt, synthetic construct
  source 1..20: mol_type = other RNA
gtggaagtctgcaacatctg

SEQ ID NO: 578 - RNA, 20 nt, synthetic construct
  source 1..20: mol_type = other RNA
gaatcagattgccgaaccaa

SEQ ID NO: 579 - RNA, 20 nt, synthetic construct
  source 1..20: mol_type = other RNA
agaatcagattgccgaacca

SEQ ID NO: 580 - RNA, 20 nt, synthetic construct
  source 1..20: mol_type = other RNA
gagaatcagattgccgaacc

SEQ ID NO: 581 - RNA, 20 nt, synthetic construct
  source 1..20: mol_type = other RNA
ggagaatcagattgccgaac

SEQ ID NO: 582 - RNA, 20 nt, synthetic construct
  source 1..20: mol_type = other RNA
caggagaatcagattgccga

SEQ ID NO: 583 - RNA, 20 nt, synthetic construct
  source 1..20: mol_type = other RNA
tcaggagaatcagattgccg

SEQ ID NO: 584 - RNA, 20 nt, synthetic construct
  source 1..20: mol_type = other RNA
ttcaggagaatcagattgcc

SEQ ID NO: 585 - RNA, 20 nt, synthetic construct
  source 1..20: mol_type = other RNA
cacaagagcctggctgggaa

SEQ ID NO: 586 - RNA, 20 nt, synthetic construct
  source 1..20: mol_type = other RNA
cacctgagatagagaatcat

SEQ ID NO: 587 - RNA, 20 nt, synthetic construct
  source 1..20: mol_type = other RNA
tcacctgagatagagaatca

SEQ ID NO: 588 - RNA, 20 nt, synthetic construct
  source 1..20: mol_type = other RNA
ctcacctgagatagagaatc

SEQ ID NO: 589 - RNA, 20 nt, synthetic construct
  source 1..20: mol_type = other RNA
ttctgaccaggtttctcacc

SEQ ID NO: 590 - RNA, 20 nt, synthetic construct
  source 1..20: mol_type = other RNA
tttctgaccaggtttctcac

SEQ ID NO: 591 - RNA, 20 nt, synthetic construct
  source 1..20: mol_type = other RNA
tgtttctgaccaggtttctc

SEQ ID NO: 592 - RNA, 20 nt, synthetic construct
  source 1..20: mol_type = other RNA
ttgtttctgaccaggtttct

SEQ ID NO: 593 - RNA, 20 nt, synthetic construct
  source 1..20: mol_type = other RNA
ctttgtttctgaccaggttt

SEQ ID NO: 594 - RNA, 20 nt, synthetic construct
  source 1..20: mol_type = other RNA
ccctttgtttctgaccaggt

SEQ ID NO: 595 - RNA, 20 nt, synthetic construct
  source 1..20: mol_type = other RNA
ccagccctttgtttctgacc

SEQ ID NO: 596 - RNA, 20 nt, synthetic construct
  source 1..20: mol_type = other RNA
gaccagccctttgtttctga

SEQ ID NO: 597 - RNA, 20 nt, synthetic construct
  source 1..20: mol_type = other RNA
tgaccagccctttgtttctg

SEQ ID NO: 598 - RNA, 20 nt, synthetic construct
  source 1..20: mol_type = other RNA
ggtgaccagccctttgtttc

SEQ ID NO: 599 - RNA, 20 nt, synthetic construct
  source 1..20: mol_type = other RNA
aggtgaccagccctttgttt

SEQ ID NO: 600 - RNA, 20 nt, synthetic construct
  source 1..20: mol_type = other RNA
tcaggtgaccagccctttgt

SEQ ID NO: 601 - RNA, 20 nt, synthetic construct
  source 1..20: mol_type = other RNA
atcaggtgaccagccctttg

SEQ ID NO: 602 - RNA, 20 nt, synthetic construct
  source 1..20: mol_type = other RNA
taaatcaggtgaccagccct

SEQ ID NO: 603 - RNA, 20 nt, synthetic construct
  source 1..20: mol_type = other RNA
ctaaatcaggtgaccagccc

SEQ ID NO: 604 - RNA, 20 nt, synthetic construct
  source 1..20: mol_type = other RNA
cctaaatcaggtgaccagcc

SEQ ID NO: 605 - RNA, 20 nt, synthetic construct
  source 1..20: mol_type = other RNA
gcctaaatcaggtgaccagc

SEQ ID NO: 606 - RNA, 20 nt, synthetic construct
  source 1..20: mol_type = other RNA
ggcctaaatcaggtgaccag

SEQ ID NO: 607 - RNA, 20 nt, synthetic construct
  source 1..20: mol_type = other RNA
tggcctaaatcaggtgacca

SEQ ID NO: 608 - RNA, 20 nt, synthetic construct
  source 1..20: mol_type = other RNA
ctggcctaaatcaggtgacc

SEQ ID NO: 609 - RNA, 20 nt, synthetic construct
  source 1..20: mol_type = other RNA
tgctggcctaaatcaggtga

SEQ ID NO: 610 - RNA, 20 nt, synthetic construct
  source 1..20: mol_type = other RNA
ttgctggcctaaatcaggtg

SEQ ID NO: 611 - RNA, 20 nt, synthetic construct
  source 1..20: mol_type = other RNA
gttgctggcctaaatcaggt

SEQ ID NO: 612 - RNA, 20 nt, synthetic construct
  source 1..20: mol_type = other RNA
ctggttgctggcctaaatca

SEQ ID NO: 613 - RNA, 20 nt, synthetic construct
  source 1..20: mol_type = other RNA
ccctggttgctggcctaaat

SEQ ID NO: 614 - RNA, 20 nt, synthetic construct
  source 1..20: mol_type = other RNA
ttccctggttgctggcctaa

SEQ ID NO: 615 - RNA, 20 nt, synthetic construct
  source 1..20: mol_type = other RNA
ctaagagcttccctggttgc

SEQ ID NO: 616 - RNA, 20 nt, synthetic construct
  source 1..20: mol_type = other RNA
tctaagagcttccctggttg

SEQ ID NO: 617 - RNA, 20 nt, synthetic construct
  source 1..20: mol_type = other RNA
ttctaagagcttccctggtt

SEQ ID NO: 618 - RNA, 20 nt, synthetic construct
  source 1..20: mol_type = other RNA
attctaagagcttccctggt

SEQ ID NO: 619 - RNA, 20 nt, synthetic construct
  source 1..20: mol_type = other RNA
gattctaagagcttccctgg

SEQ ID NO: 620 - RNA, 20 nt, synthetic construct
  source 1..20: mol_type = other RNA
ggattctaagagcttccctg

SEQ ID NO: 621 - RNA, 20 nt, synthetic construct
  source 1..20: mol_type = other RNA
ctgggattctaagagcttcc

SEQ ID NO: 622 - RNA, 20 nt, synthetic construct
  source 1..20: mol_type = other RNA
cctgggattctaagagcttc

SEQ ID NO: 623 - RNA, 20 nt, synthetic construct
  source 1..20: mol_type = other RNA
agcagaaaggactcttaggg

SEQ ID NO: 624 - RNA, 20 nt, synthetic construct
  source 1..20: mol_type = other RNA
aagcagaaaggactcttagg

SEQ ID NO: 625 - RNA, 20 nt, synthetic construct
  source 1..20: mol_type = other RNA
aaagcagaaaggactcttag

SEQ ID NO: 626 - RNA, 20 nt, synthetic construct
  source 1..20: mol_type = other RNA
gaaagcagaaaggactctta

SEQ ID NO: 627 - RNA, 20 nt, synthetic construct
  source 1..20: mol_type = other RNA
tcaatctgtgaagaaagcag

SEQ ID NO: 628 - RNA, 20 nt, synthetic construct
  source 1..20: mol_type = other RNA
tgtagtccaactctgcattt

SEQ ID NO: 629 - RNA, 20 nt, synthetic construct
  source 1..20: mol_type = other RNA
gtgtagtccaactctgcatt

SEQ ID NO: 630 - RNA, 20 nt, synthetic construct
  source 1..20: mol_type = other RNA
cgtgtagtccaactctgcat

SEQ ID NO: 631 - RNA, 20 nt, synthetic construct
  source 1..20: mol_type = other RNA
aatcgtgtagtccaactctg

SEQ ID NO: 632 - RNA, 20 nt, synthetic construct
  source 1..20: mol_type = other RNA
aaatcgtgtagtccaactct

SEQ ID NO: 633 - RNA, 20 nt, synthetic construct
  source 1..20: mol_type = other RNA
gaaatcgtgtagtccaactc

SEQ ID NO: 634 - RNA, 20 nt, synthetic construct
  source 1..20: mol_type = other RNA
agaaatcgtgtagtccaact

SEQ ID NO: 635 - RNA, 20 nt, synthetic construct
  source 1..20: mol_type = other RNA
aagaaatcgtgtagtccaac

SEQ ID NO: 636 - RNA, 20 nt, synthetic construct
  source 1..20: mol_type = other RNA
gaagaaatcgtgtagtccaa

SEQ ID NO: 637 - RNA, 20 nt, synthetic construct
  source 1..20: mol_type = other RNA
ggaagaaatcgtgtagtcca

SEQ ID NO: 638 - RNA, 20 nt, synthetic construct
  source 1..20: mol_type = other RNA
gggaagaaatcgtgtagtcc

SEQ ID NO: 639 - RNA, 20 nt, synthetic construct
  source 1..20: mol_type = other RNA
tgggaagaaatcgtgtagtc

SEQ ID NO: 640 - RNA, 20 nt, synthetic construct
  source 1..20: mol_type = other RNA
gtgggaagaaatcgtgtagt

SEQ ID NO: 641 - RNA, 20 nt, synthetic construct
  source 1..20: mol_type = other RNA
gagtgggaagaaatcgtgta

SEQ ID NO: 642 - RNA, 20 nt, synthetic construct
  source 1..20: mol_type = other RNA
ggagtgggaagaaatcgtgt

SEQ ID NO: 643 - RNA, 20 nt, synthetic construct
  source 1..20: mol_type = other RNA
agattgtggagtgggaagaa

SEQ ID NO: 644 - RNA, 20 nt, synthetic construct
  source 1..20: mol_type = other RNA
acagattgtggagtgggaag

SEQ ID NO: 645 - RNA, 20 nt, synthetic construct
  source 1..20: mol_type = other RNA
aggatgacagattgtggagt

SEQ ID NO: 646 - RNA, 20 nt, synthetic construct
  source 1..20: mol_type = other RNA
taggatgacagattgtggag

SEQ ID NO: 647 - RNA, 20 nt, synthetic construct
  source 1..20: mol_type = other RNA
ctaggatgacagattgtgga

SEQ ID NO: 648 - RNA, 20 nt, synthetic construct
  source 1..20: mol_type = other RNA
actaggatgacagattgtgg

SEQ ID NO: 649 - RNA, 20 nt, synthetic construct
  source 1..20: mol_type = other RNA
gatctatactaggatgacag

SEQ ID NO: 650 - RNA, 20 nt, synthetic construct
  source 1..20: mol_type = other RNA
caccatgatctatactagga

SEQ ID NO: 651 - RNA, 20 nt, synthetic construct
  source 1..20: mol_type = other RNA
ccaccatgatctatactagg

SEQ ID NO: 652 - RNA, 20 nt, synthetic construct
  source 1..20: mol_type = other RNA
accaccatgatctatactag

SEQ ID NO: 653 - RNA, 20 nt, synthetic construct
  source 1..20: mol_type = other RNA
gaaaccaccatgatctatac

SEQ ID NO: 654 - RNA, 20 nt, synthetic construct
  source 1..20: mol_type = other RNA
gagggaaaccaccatgatct

SEQ ID NO: 655 - RNA, 20 nt, synthetic construct
  source 1..20: mol_type = other RNA
tgagggaaaccaccatgatc

SEQ ID NO: 656 - RNA, 20 nt, synthetic construct
  source 1..20: mol_type = other RNA
ttgagggaaaccaccatgat

SEQ ID NO: 657 - RNA, 20 nt, synthetic construct
  source 1..20: mol_type = other RNA
taaacttgagggaaaccacc

SEQ ID NO: 658 - RNA, 20 nt, synthetic construct
  source 1..20: mol_type = other RNA
ataaacttgagggaaaccac

SEQ ID NO: 659 - RNA, 20 nt, synthetic construct
  source 1..20: mol_type = other RNA
cataaacttgagggaaacca

SEQ ID NO: 660 - RNA, 20 nt, synthetic construct
  source 1..20: mol_type = other RNA
acataaacttgagggaaacc

SEQ ID NO: 661 - RNA, 20 nt, synthetic construct
  source 1..20: mol_type = other RNA
gggcatgagaacataaactt

SEQ ID NO: 662 - RNA, 20 nt, synthetic construct
  source 1..20: mol_type = other RNA
agggcatgagaacataaact

SEQ ID NO: 663 - RNA, 20 nt, synthetic construct
  source 1..20: mol_type = other RNA
gagggcatgagaacataaac

SEQ ID NO: 664 - RNA, 20 nt, synthetic construct
  source 1..20: mol_type = other RNA
tgagggcatgagaacataaa

SEQ ID NO: 665 - RNA, 20 nt, synthetic construct
  source 1..20: mol_type = other RNA
ttgagggcatgagaacataa

SEQ ID NO: 666 - RNA, 20 nt, synthetic construct
  source 1..20: mol_type = other RNA
attgagggcatgagaacata

SEQ ID NO: 667 - RNA, 20 nt, synthetic construct
  source 1..20: mol_type = other RNA
agattgagggcatgagaaca

SEQ ID NO: 668 - RNA, 20 nt, synthetic construct
  source 1..20: mol_type = other RNA
cagattgagggcatgagaac

SEQ ID NO: 669 - RNA, 20 nt, synthetic construct
  source 1..20: mol_type = other RNA
acagattgagggcatgagaa

SEQ ID NO: 670 - RNA, 20 nt, synthetic construct
  source 1..20: mol_type = other RNA
tacagattgagggcatgaga

SEQ ID NO: 671 - RNA, 20 nt, synthetic construct
  source 1..20: mol_type = other RNA
ttacagattgagggcatgag

SEQ ID NO: 672 - RNA, 20 nt, synthetic construct
  source 1..20: mol_type = other RNA
tttacagattgagggcatga

SEQ ID NO: 673 - RNA, 20 nt, synthetic construct
  source 1..20: mol_type = other RNA
atttacagattgagggcatg

SEQ ID NO: 674 - RNA, 20 nt, synthetic construct
  source 1..20: mol_type = other RNA
atgggatgcctgggagggtt

SEQ ID NO: 675 - RNA, 20 nt, synthetic construct
  source 1..20: mol_type = other RNA
tatgggatgcctgggagggt

SEQ ID NO: 676 - RNA, 20 nt, synthetic construct
  source 1..20: mol_type = other RNA
tggtatgggatgcctgggag

SEQ ID NO: 677 - RNA, 20 nt, synthetic construct
  source 1..20: mol_type = other RNA
ctggtatgggatgcctggga

SEQ ID NO: 678 - RNA, 20 nt, synthetic construct
  source 1..20: mol_type = other RNA
gtgctggtatgggatgcctg

SEQ ID NO: 679 - RNA, 20 nt, synthetic construct
  source 1..20: mol_type = other RNA
ggtgctggtatgggatgcct

SEQ ID NO: 680 - RNA, 20 nt, synthetic construct
  source 1..20: mol_type = other RNA
acggtgctggtatgggatgc

SEQ ID NO: 681 - RNA, 20 nt, synthetic construct
  source 1..20: mol_type = other RNA
aggaacggtgctggtatggg

SEQ ID NO: 682 - RNA, 20 nt, synthetic construct
  source 1..20: mol_type = other RNA
aagtgtgaagctcagggttt

SEQ ID NO: 683 - RNA, 20 nt, synthetic construct
  source 1..20: mol_type = other RNA
taagtgtgaagctcagggtt

SEQ ID NO: 684 - RNA, 20 nt, synthetic construct
  source 1..20: mol_type = other RNA
ttaagtgtgaagctcagggt

SEQ ID NO: 685 - RNA, 20 nt, synthetic construct
  source 1..20: mol_type = other RNA
tttaagtgtgaagctcaggg

SEQ ID NO: 686 - RNA, 20 nt, synthetic construct
  source 1..20: mol_type = other RNA
gtttaagtgtgaagctcagg

SEQ ID NO: 687 - RNA, 20 nt, synthetic construct
  source 1..20: mol_type = other RNA
ccatgagtttaagtgtgaag

SEQ ID NO: 688 - RNA, 20 nt, synthetic construct
  source 1..20: mol_type = other RNA
cccatgagtttaagtgtgaa

SEQ ID NO: 689 - RNA, 20 nt, synthetic construct
  source 1..20: mol_type = other RNA
gtggactctgctctgaaggg

SEQ ID NO: 690 - RNA, 20 nt, synthetic construct
  source 1..20: mol_type = other RNA
tgtggactctgctctgaagg

SEQ ID NO: 691 - RNA, 20 nt, synthetic construct
  source 1..20: mol_type = other RNA
ctgtggactctgctctgaag

SEQ ID NO: 692 - RNA, 20 nt, synthetic construct
  source 1..20: mol_type = other RNA
gtatgtagcaccacccgcct

SEQ ID NO: 693 - RNA, 20 nt, synthetic construct
  source 1..20: mol_type = other RNA
tgtatgtagcaccacccgcc

SEQ ID NO: 694 - RNA, 20 nt, synthetic construct
  source 1..20: mol_type = other RNA
gtgtatgtagcaccacccgc

SEQ ID NO: 695 - RNA, 20 nt, synthetic construct
  source 1..20: mol_type = other RNA
ttgtgtatgtagcaccaccc

SEQ ID NO: 696 - RNA, 20 nt, synthetic construct
  source 1..20: mol_type = other RNA
cttgtgtatgtagcaccacc

SEQ ID NO: 697 - RNA, 20 nt, synthetic construct
  source 1..20: mol_type = other RNA
gtctggcttaaagtgtatct

SEQ ID NO: 698 - RNA, 20 nt, synthetic construct
  source 1..20: mol_type = other RNA
tgtctggcttaaagtgtatc

SEQ ID NO: 699 - RNA, 20 nt, synthetic construct
  source 1..20: mol_type = other RNA
ttaggtgtctggcttaaagt

SEQ ID NO: 700 - RNA, 20 nt, synthetic construct
  source 1..20: mol_type = other RNA
atcagtatcacatgggcagt

SEQ ID NO: 701 - RNA, 20 nt, synthetic construct
  source 1..20: mol_type = other RNA
aatcagtatcacatgggcag

SEQ ID NO: 702 - RNA, 20 nt, synthetic construct
  source 1..20: mol_type = other RNA
caatcagtatcacatgggca

SEQ ID NO: 703 - RNA, 20 nt, synthetic construct
  source 1..20: mol_type = other RNA
gcaatcagtatcacatgggc

SEQ ID NO: 704 - RNA, 20 nt, synthetic construct
  source 1..20: mol_type = other RNA
tggcaatcagtatcacatgg

SEQ ID NO: 705 - RNA, 20 nt, synthetic construct
  source 1..20: mol_type = other RNA
ccttaatgtggcaatcagta

SEQ ID NO: 706 - RNA, 20 nt, synthetic construct
  source 1..20: mol_type = other RNA
accttaatgtggcaatcagt

SEQ ID NO: 707 - RNA, 20 nt, synthetic construct
  source 1..20: mol_type = other RNA
aaccttaatgtggcaatcag

SEQ ID NO: 708 - RNA, 20 nt, synthetic construct
  source 1..20: mol_type = other RNA
caaccttaatgtggcaatca

SEQ ID NO: 709 - RNA, 20 nt, synthetic construct
  source 1..20: mol_type = other RNA
tcaaccttaatgtggcaatc

SEQ ID NO: 710 - RNA, 20 nt, synthetic construct
  source 1..20: mol_type = other RNA
gttcaaccttaatgtggcaa

SEQ ID NO: 711 - RNA, 20 nt, synthetic construct
  source 1..20: mol_type = other RNA
tgttcaaccttaatgtggca

SEQ ID NO: 712 - RNA, 20 nt, synthetic construct
  source 1..20: mol_type = other RNA
ctgttcaaccttaatgtggc

SEQ ID NO: 713 - RNA, 20 nt, synthetic construct
  source 1..20: mol_type = other RNA
gctgttcaaccttaatgtgg

SEQ ID NO: 714 - RNA, 20 nt, synthetic construct
  source 1..20: mol_type = other RNA
catgctgttcaaccttaatg

SEQ ID NO: 715 - RNA, 20 nt, synthetic construct
  source 1..20: mol_type = other RNA
ccatgctgttcaaccttaat

SEQ ID NO: 716 - RNA, 20 nt, synthetic construct
  source 1..20: mol_type = other RNA
gccatgctgttcaaccttaa

SEQ ID NO: 717 - RNA, 20 nt, synthetic construct
  source 1..20: mol_type = other RNA
agactctgagccatgctgtt

SEQ ID NO: 718 - RNA, 20 nt, synthetic construct
  source 1..20: mol_type = other RNA
tagactctgagccatgctgt

SEQ ID NO: 719 - RNA, 20 nt, synthetic construct
  source 1..20: mol_type = other RNA
ctagactctgagccatgctg

SEQ ID NO: 720 - RNA, 20 nt, synthetic construct
  source 1..20: mol_type = other RNA
tgatgagacagcttggtgat

SEQ ID NO: 721 - RNA, 20 nt, synthetic construct
  source 1..20: mol_type = other RNA
ggtgatgagacagcttggtg

SEQ ID NO: 722 - RNA, 20 nt, synthetic construct
  source 1..20: mol_type = other RNA
tggtgatgagacagcttggt

SEQ ID NO: 723 - RNA, 20 nt, synthetic construct
  source 1..20: mol_type = other RNA
ttggtgatgagacagcttgg

SEQ ID NO: 724 - RNA, 20 nt, synthetic construct
  source 1..20: mol_type = other RNA
tttggtgatgagacagcttg

SEQ ID NO: 725 - RNA, 20 nt, synthetic construct
  source 1..20: mol_type = other RNA
atttggtgatgagacagctt

SEQ ID NO: 726 - RNA, 20 nt, synthetic construct
  source 1..20: mol_type = other RNA
tatttggtgatgagacagct

SEQ ID NO: 727 - RNA, 20 nt, synthetic construct
  source 1..20: mol_type = other RNA
ctatttggtgatgagacagc

SEQ ID NO: 728 - RNA, 20 nt, synthetic construct
  source 1..20: mol_type = other RNA
acctatttggtgatgagaca

SEQ ID NO: 729 - RNA, 20 nt, synthetic construct
  source 1..20: mol_type = other RNA
actacctatttggtgatgag

SEQ ID NO: 730 - RNA, 20 nt, synthetic construct
  source 1..20: mol_type = other RNA
tgactacctatttggtgatg

SEQ ID NO: 731 - RNA, 20 nt, synthetic construct
  source 1..20: mol_type = other RNA
cttgactacctatttggtga

SEQ ID NO: 732 - RNA, 20 nt, synthetic construct
  source 1..20: mol_type = other RNA
ccttgactacctatttggtg

SEQ ID NO: 733 - RNA, 20 nt, synthetic construct
  source 1..20: mol_type = other RNA
ctgccttgactacctatttg

SEQ ID NO: 734 - RNA, 20 nt, synthetic construct
  source 1..20: mol_type = other RNA
ggctgccttgactacctatt

SEQ ID NO: 735 - RNA, 20 nt, synthetic construct
  source 1..20: mol_type = other RNA
aggctgccttgactacctat

SEQ ID NO: 736 - RNA, 20 nt, synthetic construct
  source 1..20: mol_type = other RNA
tgcctcttgtcctaaagtgg

SEQ ID NO: 737 - RNA, 20 nt, synthetic construct
  source 1..20: mol_type = other RNA
ctgcctcttgtcctaaagtg

SEQ ID NO: 738 - RNA, 20 nt, synthetic construct
  source 1..20: mol_type = other RNA
gctgcctcttgtcctaaagt

SEQ ID NO: 739 - RNA, 20 nt, synthetic construct
  source 1..20: mol_type = other RNA
agctgcctcttgtcctaaag

SEQ ID NO: 740 - RNA, 20 nt, synthetic construct
  source 1..20: mol_type = other RNA
aagctgcctcttgtcctaaa

SEQ ID NO: 741 - RNA, 20 nt, synthetic construct
  source 1..20: mol_type = other RNA
tctggtggaaggcaagctgc

SEQ ID NO: 742 - RNA, 20 nt, synthetic construct
  source 1..20: mol_type = other RNA
cgtctggtggaaggcaagct

SEQ ID NO: 743 - RNA, 20 nt, synthetic construct
  source 1..20: mol_type = other RNA
ctggtcagtgtagaagggta

SEQ ID NO: 744 - RNA, 20 nt, synthetic construct
  source 1..20: mol_type = other RNA
tagcttgctggtcagtgtag

SEQ ID NO: 745 - RNA, 20 nt, synthetic construct
  source 1..20: mol_type = other RNA
ctagcttgctggtcagtgta

SEQ ID NO: 746 - RNA, 20 nt, synthetic construct
  source 1..20: mol_type = other RNA
cctagcttgctggtcagtgt

SEQ ID NO: 747 - RNA, 20 nt, synthetic construct
  source 1..20: mol_type = other RNA
gcctagcttgctggtcagtg

SEQ ID NO: 748 - RNA, 20 nt, synthetic construct
  source 1..20: mol_type = other RNA
gagttgggtgagttcccttt

SEQ ID NO: 749 - RNA, 20 nt, synthetic construct
  source 1..20: mol_type = other RNA
agagttgggtgagttccctt

SEQ ID NO: 750 - RNA, 20 nt, synthetic construct
  source 1..20: mol_type = other RNA
tagagttgggtgagttccct

SEQ ID NO: 751 - RNA, 20 nt, synthetic construct
  source 1..20: mol_type = other RNA
ttagagttgggtgagttccc

SEQ ID NO: 752 - RNA, 20 nt, synthetic construct
  source 1..20: mol_type = other RNA
tttagagttgggtgagttcc

SEQ ID NO: 753 - RNA, 20 nt, synthetic construct
  source 1..20: mol_type = other RNA
acaatttagagttgggtgag

SEQ ID NO: 754 - RNA, 20 nt, synthetic construct
  source 1..20: mol_type = other RNA
cacaatttagagttgggtga

SEQ ID NO: 755 - RNA, 20 nt, synthetic construct
  source 1..20: mol_type = other RNA
gcacaatttagagttgggtg

SEQ ID NO: 756 - RNA, 20 nt, synthetic construct
  source 1..20: mol_type = other RNA
ggcacaatttagagttgggt

SEQ ID NO: 757 - RNA, 20 nt, synthetic construct
  source 1..20: mol_type = other RNA
cggcacaatttagagttggg

SEQ ID NO: 758 - RNA, 20 nt, synthetic construct
  source 1..20: mol_type = other RNA
gcggcacaatttagagttgg

SEQ ID NO: 759 - RNA, 20 nt, synthetic construct
  source 1..20: mol_type = other RNA
agcggcacaatttagagttg

SEQ ID NO: 760 - RNA, 20 nt, synthetic construct
  source 1..20: mol_type = other RNA
taagcggcacaatttagagt

SEQ ID NO: 761 - RNA, 20 nt, synthetic construct
  source 1..20: mol_type = other RNA
agtctaagcggcacaattta

SEQ ID NO: 762 - RNA, 20 nt, synthetic construct
  source 1..20: mol_type = other RNA
aagtctaagcggcacaattt

SEQ ID NO: 763 - RNA, 20 nt, synthetic construct
  source 1..20: mol_type = other RNA
taagtctaagcggcacaatt

SEQ ID NO: 764 - RNA, 20 nt, synthetic construct
  source 1..20: mol_type = other RNA
ctaagtctaagcggcacaat

SEQ ID NO: 765 - RNA, 20 nt, synthetic construct
  source 1..20: mol_type = other RNA
gctaagtctaagcggcacaa

SEQ ID NO: 766 - RNA, 20 nt, synthetic construct
  source 1..20: mol_type = other RNA
agctaagtctaagcggcaca

SEQ ID NO: 767 - RNA, 20 nt, synthetic construct
  source 1..20: mol_type = other RNA
cagctaagtctaagcggcac

SEQ ID NO: 768 - RNA, 20 nt, synthetic construct
  source 1..20: mol_type = other RNA
acagctaagtctaagcggca

SEQ ID NO: 769 - RNA, 20 nt, synthetic construct
  source 1..20: mol_type = other RNA
gacagctaagtctaagcggc

SEQ ID NO: 770 - RNA, 20 nt, synthetic construct
  source 1..20: mol_type = other RNA
ctgacagctaagtctaagcg

SEQ ID NO: 771 - RNA, 20 nt, synthetic construct
  source 1..20: mol_type = other RNA
actgacagctaagtctaagc

SEQ ID NO: 772 - RNA, 20 nt, synthetic construct
  source 1..20: mol_type = other RNA
cactgacagctaagtctaag

SEQ ID NO: 773 - RNA, 20 nt, synthetic construct
  source 1..20: mol_type = other RNA
acactgacagctaagtctaa

SEQ ID NO: 774 - RNA, 20 nt, synthetic construct
  source 1..20: mol_type = other RNA
cacactgacagctaagtcta

SEQ ID NO: 775 - RNA, 20 nt, synthetic construct
  source 1..20: mol_type = other RNA
tcacactgacagctaagtct

SEQ ID NO: 776 - RNA, 20 nt, synthetic construct
  source 1..20: mol_type = other RNA
gtgggaaaggaagtcacact

SEQ ID NO: 777 - RNA, 20 nt, synthetic construct
  source 1..20: mol_type = other RNA
ggtgggaaaggaagtcacac

SEQ ID NO: 778 - RNA, 20 nt, synthetic construct
  source 1..20: mol_type = other RNA
aggaattttcactcgctccc

SEQ ID NO: 779 - RNA, 20 nt, synthetic construct
  source 1..20: mol_type = other RNA
aaggaattttcactcgctcc

SEQ ID NO: 780 - RNA, 20 nt, synthetic construct
  source 1..20: mol_type = other RNA
taaggaattttcactcgctc

SEQ ID NO: 781 - RNA, 20 nt, synthetic construct
  source 1..20: mol_type = other RNA
ctaaggaattttcactcgct

SEQ ID NO: 782 - RNA, 20 nt, synthetic construct
  source 1..20: mol_type = other RNA
acctaaggaattttcactcg

SEQ ID NO: 783 - RNA, 20 nt, synthetic construct
  source 1..20: mol_type = other RNA
cacctaaggaattttcactc

SEQ ID NO: 784 - RNA, 20 nt, synthetic construct
  source 1..20: mol_type = other RNA
acccaaggaaatcttaggaa

SEQ ID NO: 785 - RNA, 20 nt, synthetic construct
  source 1..20: mol_type = other RNA
tacccaaggaaatcttagga

SEQ ID NO: 786 - RNA, 20 nt, synthetic construct
  source 1..20: mol_type = other RNA
accagatacccaaggaaatc

SEQ ID NO: 787 - RNA, 20 nt, synthetic construct
  source 1..20: mol_type = other RNA
catgcacacactcaaatatg

SEQ ID NO: 788 - RNA, 20 nt, synthetic construct
  source 1..20: mol_type = other RNA
acacatgcacacactcaaat

SEQ ID NO: 789 - RNA, 20 nt, synthetic construct
  source 1..20: mol_type = other RNA
acccaaacttccttcaaccc

SEQ ID NO: 790 - RNA, 20 nt, synthetic construct
  source 1..20: mol_type = other RNA
aacccaaacttccttcaacc

SEQ ID NO: 791 - RNA, 20 nt, synthetic construct
  source 1..20: mol_type = other RNA
caacccaaacttccttcaac

SEQ ID NO: 792 - RNA, 20 nt, synthetic construct
  source 1..20: mol_type = other RNA
atcaacccaaacttccttca

SEQ ID NO: 793 - RNA, 20 nt, synthetic construct
  source 1..20: mol_type = other RNA
ttaaatctgtcagaccagct

SEQ ID NO: 794 - RNA, 20 nt, synthetic construct
  source 1..20: mol_type = other RNA
cttaaatctgtcagaccagc

SEQ ID NO: 795 - RNA, 20 nt, synthetic construct
  source 1..20: mol_type = other RNA
tcttaaatctgtcagaccag

SEQ ID NO: 796 - RNA, 20 nt, synthetic construct
  source 1..20: mol_type = other RNA
acagtcctagtctaaaatgc

SEQ ID NO: 797 - RNA, 20 nt, synthetic construct
  source 1..20: mol_type = other RNA
cagtagaacagtcctagtct

SEQ ID NO: 798 - RNA, 20 nt, synthetic construct
  source 1..20: mol_type = other RNA
acagtagaacagtcctagtc

SEQ ID NO: 799 - RNA, 20 nt, synthetic construct
  source 1..20: mol_type = other RNA
cacagtagaacagtcctagt

SEQ ID NO: 800 - RNA, 20 nt, synthetic construct
  source 1..20: mol_type = other RNA
tcacagtagaacagtcctag

SEQ ID NO: 801 - RNA, 20 nt, synthetic construct
  source 1..20: mol_type = other RNA
ttcacagtagaacagtccta

SEQ ID NO: 802 - RNA, 20 nt, synthetic construct
  source 1..20: mol_type = other RNA
cttcacagtagaacagtcct

SEQ ID NO: 803 - RNA, 20 nt, synthetic construct
  source 1..20: mol_type = other RNA
cagaactttcttcacagtag

SEQ ID NO: 804 - RNA, 20 nt, synthetic construct
  source 1..20: mol_type = other RNA
gacagaactttcttcacagt

SEQ ID NO: 805 - RNA, 20 nt, synthetic construct
  source 1..20: mol_type = other RNA
gggctaaaggagacagaact

SEQ ID NO: 806 - RNA, 20 nt, synthetic construct
  source 1..20: mol_type = other RNA
cgggctaaaggagacagaac

SEQ ID NO: 807 - RNA, 20 nt, synthetic construct
  source 1..20: mol_type = other RNA
ccgggctaaaggagacagaa

SEQ ID NO: 808 - RNA, 20 nt, synthetic construct
  source 1..20: mol_type = other RNA
accgggctaaaggagacaga

SEQ ID NO: 809 - RNA, 20 nt, synthetic construct
  source 1..20: mol_type = other RNA
aaccgggctaaaggagacag

SEQ ID NO: 810 - RNA, 20 nt, synthetic construct
  source 1..20: mol_type = other RNA
aaaccgggctaaaggagaca

SEQ ID NO: 811 - RNA, 20 nt, synthetic construct
  source 1..20: mol_type = other RNA
caaaccgggctaaaggagac

SEQ ID NO: 812 - RNA, 20 nt, synthetic construct
  source 1..20: mol_type = other RNA
acaaaccgggctaaaggaga

SEQ ID NO: 813 - RNA, 20 nt, synthetic construct
  source 1..20: mol_type = other RNA
aacaaaccgggctaaaggag

SEQ ID NO: 814 - RNA, 20 nt, synthetic construct
  source 1..20: mol_type = other RNA
aaacaaaccgggctaaagga

SEQ ID NO: 815 - RNA, 20 nt, synthetic construct
  source 1..20: mol_type = other RNA
gaaacaaaccgggctaaagg

SEQ ID NO: 816 - RNA, 20 nt, synthetic construct
  source 1..20: mol_type = other RNA
agaaacaaaccgggctaaag

SEQ ID NO: 817 - RNA, 20 nt, synthetic construct
  source 1..20: mol_type = other RNA
gagaaacaaaccgggctaaa

SEQ ID NO: 818 - RNA, 20 nt, synthetic construct
  source 1..20: mol_type = other RNA
ggagaaacaaaccgggctaa

SEQ ID NO: 819 - RNA, 20 nt, synthetic construct
  source 1..20: mol_type = other RNA
gggagaaacaaaccgggcta

SEQ ID NO: 820 - RNA, 20 nt, synthetic construct
  source 1..20: mol_type = other RNA
agggagaaacaaaccgggct

SEQ ID NO: 821 - RNA, 20 nt, synthetic construct
  source 1..20: mol_type = other RNA
cagggagaaacaaaccgggc

SEQ ID NO: 822 - RNA, 20 nt, synthetic construct
  source 1..20: mol_type = other RNA
gagcagggagaaacaaaccg

SEQ ID NO: 823 - RNA, 20 nt, synthetic construct
  source 1..20: mol_type = other RNA
agaaaagaacactgcttggg

SEQ ID NO: 824 - RNA, 20 nt, synthetic construct
  source 1..20: mol_type = other RNA
gtcacatctgcggctcacag

SEQ ID NO: 825 - RNA, 20 nt, synthetic construct
  source 1..20: mol_type = other RNA
agtcacatctgcggctcaca

SEQ ID NO: 826 - RNA, 20 nt, synthetic construct
  source 1..20: mol_type = other RNA
aagtcacatctgcggctcac

SEQ ID NO: 827 - RNA, 20 nt, synthetic construct
  source 1..20: mol_type = other RNA
aaagtcacatctgcggctca

SEQ ID NO: 828 - RNA, 20 nt, synthetic construct
  source 1..20: mol_type = other RNA
aaaagtcacatctgcggctc

SEQ ID NO: 829 - RNA, 20 nt, synthetic construct
  source 1..20: mol_type = other RNA
gattgctgaagagatgactt

SEQ ID NO: 830 - RNA, 20 nt, synthetic construct
  source 1..20: mol_type = other RNA
tggattgctgaagagatgac

SEQ ID NO: 831 - RNA, 20 nt, synthetic construct
  source 1..20: mol_type = other RNA
tctggattgctgaagagatg

SEQ ID NO: 832 - RNA, 20 nt, synthetic construct
  source 1..20: mol_type = other RNA
gaacctctggattgctgaag

SEQ ID NO: 833 - RNA, 20 nt, synthetic construct
  source 1..20: mol_type = other RNA
ggaacctctggattgctgaa

SEQ ID NO: 834 - RNA, 20 nt, synthetic construct
  source 1..20: mol_type = other RNA
aggaacctctggattgctga

SEQ ID NO: 835 - RNA, 20 nt, synthetic construct
  source 1..20: mol_type = other RNA
aaggaacctctggattgctg

SEQ ID NO: 836 - RNA, 20 nt, synthetic construct
  source 1..20: mol_type = other RNA
caaggaacctctggattgct

SEQ ID NO: 837 - RNA, 20 nt, synthetic construct
  source 1..20: mol_type = other RNA
tcaaggaacctctggattgc

SEQ ID NO: 838 - RNA, 20 nt, synthetic construct
  source 1..20: mol_type = other RNA
gtcaaggaacctctggattg

SEQ ID NO: 839 - RNA, 20 nt, synthetic construct
  source 1..20: mol_type = other RNA
gacaaataatgaggtcaagg

SEQ ID NO: 840 - RNA, 20 nt, synthetic construct
  source 1..20: mol_type = other RNA
ggacaaataatgaggtcaag

SEQ ID NO: 841 - RNA, 20 nt, synthetic construct
  source 1..20: mol_type = other RNA
agggagagataggacaaata

SEQ ID NO: 842 - RNA, 20 nt, synthetic construct
  source 1..20: mol_type = other RNA
taagggagagataggacaaa

SEQ ID NO: 843 - RNA, 20 nt, synthetic construct
  source 1..20: mol_type = other RNA
ataagggagagataggacaa

SEQ ID NO: 844 - RNA, 20 nt, synthetic construct
  source 1..20: mol_type = other RNA
aggactataagggagagata

SEQ ID NO: 845 - RNA, 20 nt, synthetic construct
  source 1..20: mol_type = other RNA
ttaggactataagggagaga

SEQ ID NO: 846 - RNA, 20 nt, synthetic construct
  source 1..20: mol_type = other RNA
gtcttggcttaggactataa

SEQ ID NO: 847 - RNA, 20 nt, synthetic construct
  source 1..20: mol_type = other RNA
tgtcttggcttaggactata

SEQ ID NO: 848 - RNA, 20 nt, synthetic construct
  source 1..20: mol_type = other RNA
atgtcttggcttaggactat

SEQ ID NO: 849 - RNA, 20 nt, synthetic construct
  source 1..20: mol_type = other RNA
aatgtcttggcttaggacta

SEQ ID NO: 850 - RNA, 20 nt, synthetic construct
  source 1..20: mol_type = other RNA
aaatgtcttggcttaggact

SEQ ID NO: 851 - RNA, 20 nt, synthetic construct
  source 1..20: mol_type = other RNA
caaatgtcttggcttaggac

SEQ ID NO: 852 - RNA, 20 nt, synthetic construct
  source 1..20: mol_type = other RNA
gtcaaatgtcttggcttagg

SEQ ID NO: 853 - RNA, 20 nt, synthetic construct
  source 1..20: mol_type = other RNA
ggtcaaatgtcttggcttag

SEQ ID NO: 854 - RNA, 20 nt, synthetic construct
  source 1..20: mol_type = other RNA
aggtcaaatgtcttggctta

SEQ ID NO: 855 - RNA, 20 nt, synthetic construct
  source 1..20: mol_type = other RNA
aaggtcaaatgtcttggctt

SEQ ID NO: 856 - RNA, 20 nt, synthetic construct
  source 1..20: mol_type = other RNA
aaaggtcaaatgtcttggct

SEQ ID NO: 857 - RNA, 20 nt, synthetic construct
  source 1..20: mol_type = other RNA
caaaggtcaaatgtcttggc

SEQ ID NO: 858 - RNA, 20 nt, synthetic construct
  source 1..20: mol_type = other RNA
cacatgacactgcaaaggtc

SEQ ID NO: 859 - RNA, 20 nt, synthetic construct
  source 1..20: mol_type = other RNA
tcacatgacactgcaaaggt

SEQ ID NO: 860 - RNA, 20 nt, synthetic construct
  source 1..20: mol_type = other RNA
ctcacatgacactgcaaagg

SEQ ID NO: 861 - RNA, 20 nt, synthetic construct
  source 1..20: mol_type = other RNA
cctcacatgacactgcaaag

SEQ ID NO: 862 - RNA, 20 nt, synthetic construct
  source 1..20: mol_type = other RNA
ccctcacatgacactgcaaa

SEQ ID NO: 863 - RNA, 20 nt, synthetic construct
  source 1..20: mol_type = other RNA
gccctcacatgacactgcaa

SEQ ID NO: 864 - RNA, 20 nt, synthetic construct
  source 1..20: mol_type = other RNA
acgccctcacatgacactgc

SEQ ID NO: 865 - RNA, 20 nt, synthetic construct
  source 1..20: mol_type = other RNA
ctgacgccctcacatgacac

SEQ ID NO: 866 - RNA, 20 nt, synthetic construct
  source 1..20: mol_type = other RNA
actgacgccctcacatgaca

SEQ ID NO: 867 - RNA, 20 nt, synthetic construct
  source 1..20: mol_type = other RNA
tactgacgccctcacatgac

SEQ ID NO: 868 - RNA, 20 nt, synthetic construct
  source 1..20: mol_type = other RNA
atactgacgccctcacatga

SEQ ID NO: 869 - RNA, 20 nt, synthetic construct
  source 1..20: mol_type = other RNA
tatactgacgccctcacatg

SEQ ID NO: 870 - RNA, 20 nt, synthetic construct
  source 1..20: mol_type = other RNA
ctatactgacgccctcacat

SEQ ID NO: 871 - RNA, 20 nt, synthetic construct
  source 1..20: mol_type = other RNA
tctatactgacgccctcaca

SEQ ID NO: 872 - RNA, 20 nt, synthetic construct
  source 1..20: mol_type = other RNA
ctctatactgacgccctcac

SEQ ID NO: 873 - RNA, 20 nt, synthetic construct
  source 1..20: mol_type = other RNA
cctctatactgacgccctca

SEQ ID NO: 874 - RNA, 20 nt, synthetic construct
  source 1..20: mol_type = other RNA
gcctctatactgacgccctc

SEQ ID NO: 875 - RNA, 20 nt, synthetic construct
  source 1..20: mol_type = other RNA
ggcctctatactgacgccct

SEQ ID NO: 876 - RNA, 20 nt, synthetic construct
  source 1..20: mol_type = other RNA
tgccaggcccagatgcaaag

SEQ ID NO: 877 - RNA, 20 nt, synthetic construct
  source 1..20: mol_type = other RNA
cagggtttagcctccagagg

SEQ ID NO: 878 - RNA, 20 nt, synthetic construct
  source 1..20: mol_type = other RNA
acagggtttagcctccagag

SEQ ID NO: 879 - RNA, 20 nt, synthetic construct
  source 1..20: mol_type = other RNA
gacagggtttagcctccaga

SEQ ID NO: 880 - RNA, 20 nt, synthetic construct
  source 1..20: mol_type = other RNA
agacagggtttagcctccag

SEQ ID NO: 881 - RNA, 20 nt, synthetic construct
  source 1..20: mol_type = other RNA
ccagacagggtttagcctcc

SEQ ID NO: 882 - RNA, 20 nt, synthetic construct
  source 1..20: mol_type = other RNA
tccagacagggtttagcctc

SEQ ID NO: 883 - RNA, 20 nt, synthetic construct
  source 1..20: mol_type = other RNA
atccagacagggtttagcct

SEQ ID NO: 884 - RNA, 20 nt, synthetic construct
  source 1..20: mol_type = other RNA
aatccagacagggtttagcc

SEQ ID NO: 885 - RNA, 20 nt, synthetic construct
  source 1..20: mol_type = other RNA
aaatccagacagggtttagc

SEQ ID NO: 886 - RNA, 20 nt, synthetic construct
  source 1..20: mol_type = other RNA
gaaatccagacagggtttag

SEQ ID NO: 887 - RNA, 20 nt, synthetic construct
  source 1..20: mol_type = other RNA
agaaatccagacagggttta

SEQ ID NO: 888 - RNA, 20 nt, synthetic construct
  source 1..20: mol_type = other RNA
gagaaatccagacagggttt

SEQ ID NO: 889 - RNA, 20 nt, synthetic construct
  source 1..20: mol_type = other RNA
aagagaaatccagacagggt

SEQ ID NO: 890 - RNA, 20 nt, synthetic construct
  source 1..20: mol_type = other RNA
caagagaaatccagacaggg

SEQ ID NO: 891 - RNA, 20 nt, synthetic construct
  source 1..20: mol_type = other RNA
atcccaagagaaatccagac

SEQ ID NO: 892 - RNA, 20 nt, synthetic construct
  source 1..20: mol_type = other RNA
gtctgtccagaagatcccac

SEQ ID NO: 893 - RNA, 20 nt, synthetic construct
  source 1..20: mol_type = other RNA
ttgtctgtccagaagatccc

SEQ ID NO: 894 - RNA, 20 nt, synthetic construct
  source 1..20: mol_type = other RNA
cggttgtctgtccagaagat

SEQ ID NO: 895 - RNA, 20 nt, synthetic construct
  source 1..20: mol_type = other RNA
tcacggttgtctgtccagaa

SEQ ID NO: 896 - RNA, 20 nt, synthetic construct
  source 1..20: mol_type = other RNA
gtcacggttgtctgtccaga

SEQ ID NO: 897 - RNA, 20 nt, synthetic construct
  source 1..20: mol_type = other RNA
tgtcacggttgtctgtccag

SEQ ID NO: 898 - RNA, 20 nt, synthetic construct
  source 1..20: mol_type = other RNA
atgtcacggttgtctgtcca

SEQ ID NO: 899 - RNA, 20 nt, synthetic construct
  source 1..20: mol_type = other RNA
gatgtcacggttgtctgtcc

SEQ ID NO: 900 - RNA, 20 nt, synthetic construct
  source 1..20: mol_type = other RNA
tgatgtcacggttgtctgtc

SEQ ID NO: 901 - RNA, 20 nt, synthetic construct
  source 1..20: mol_type = other RNA
ctgatgtcacggttgtctgt

SEQ ID NO: 902 - RNA, 20 nt, synthetic construct
  source 1..20: mol_type = other RNA
gctgatgtcacggttgtctg

SEQ ID NO: 903 - RNA, 20 nt, synthetic construct
  source 1..20: mol_type = other RNA
tgctgatgtcacggttgtct

SEQ ID NO: 904 - RNA, 20 nt, synthetic construct
  source 1..20: mol_type = other RNA
ctgctgatgtcacggttgtc

SEQ ID NO: 905 - RNA, 20 nt, synthetic construct
  source 1..20: mol_type = other RNA
actgctgatgtcacggttgt

SEQ ID NO: 906 - RNA, 20 nt, synthetic construct
  source 1..20: mol_type = other RNA
cactgctgatgtcacggttg

SEQ ID NO: 907 - RNA, 20 nt, synthetic construct
  source 1..20: mol_type = other RNA
gcactgctgatgtcacggtt

SEQ ID NO: 908 - RNA, 20 nt, synthetic construct
  source 1..20: mol_type = other RNA
tgttcagtccacacacagca

SEQ ID NO: 909 - RNA, 20 nt, synthetic construct
  source 1..20: mol_type = other RNA
caaagtgcaggtgttcagtc

SEQ ID NO: 910 - RNA, 20 nt, synthetic construct
  source 1..20: mol_type = other RNA
gcaaagtgcaggtgttcagt

SEQ ID NO: 911 - RNA, 20 nt, synthetic construct
  source 1..20: mol_type = other RNA
gcgtgtcctctgcaaagtgc

SEQ ID NO: 912 - RNA, 20 nt, synthetic construct
  source 1..20: mol_type = other RNA
cagcgtgtcctctgcaaagt

SEQ ID NO: 913 - RNA, 20 nt, synthetic construct
  source 1..20: mol_type = other RNA
tgtccactctttcttgttct

SEQ ID NO: 914 - RNA, 20 nt, synthetic construct
  source 1..20: mol_type = other RNA
gtgtccactctttcttgttc

SEQ ID NO: 915 - RNA, 20 nt, synthetic construct
  source 1..20: mol_type = other RNA
cgcaagacagatgatgcagg

SEQ ID NO: 916 - RNA, 20 nt, synthetic construct
  source 1..20: mol_type = other RNA
cacgcaagacagatgatgca

SEQ ID NO: 917 - RNA, 20 nt, synthetic construct
  source 1..20: mol_type = other RNA
gcacgcaagacagatgatgc

SEQ ID NO: 918 - RNA, 20 nt, synthetic construct
  source 1..20: mol_type = other RNA
agcacgcaagacagatgatg

SEQ ID NO: 919 - RNA, 20 nt, synthetic construct
  source 1..20: mol_type = other RNA
tagcacgcaagacagatgat

SEQ ID NO: 920 - RNA, 20 nt, synthetic construct
  source 1..20: mol_type = other RNA
aatagcacgcaagacagatg

SEQ ID NO: 921 - RNA, 20 nt, synthetic construct
  source 1..20: mol_type = other RNA
aaatagcacgcaagacagat

SEQ ID NO: 922 - RNA, 20 nt, synthetic construct
  source 1..20: mol_type = other RNA
gaaatagcacgcaagacaga

SEQ ID NO: 923 - RNA, 20 nt, synthetic construct
  source 1..20: mol_type = other RNA
tgaaatagcacgcaagacag

SEQ ID NO: 924 - RNA, 20 nt, synthetic construct
  source 1..20: mol_type = other RNA
ctgaaatagcacgcaagaca

SEQ ID NO: 925 - RNA, 20 nt, synthetic construct
  source 1..20: mol_type = other RNA
tctgaaatagcacgcaagac

SEQ ID NO: 926 - RNA, 20 nt, synthetic construct
  source 1..20: mol_type = other RNA
ctctgaaatagcacgcaaga

SEQ ID NO: 927 - RNA, 20 nt, synthetic construct
  source 1..20: mol_type = other RNA
actctgaaatagcacgcaag

SEQ ID NO: 928 - RNA, 20 nt, synthetic construct
  source 1..20: mol_type = other RNA
cactctgaaatagcacgcaa

SEQ ID NO: 929 - RNA, 20 nt, synthetic construct
  source 1..20: mol_type = other RNA
gctccagaaggcaaatagtt

SEQ ID NO: 930 - RNA, 19 nt, synthetic construct
  source 1..19: mol_type = other RNA
caactcgcggctctaggga

SEQ ID NO: 931 - RNA, 19 nt, synthetic construct
  source 1..19: mol_type = other RNA
tccctagagccgcgagttg

SEQ ID NO: 932 - RNA, 19 nt, synthetic construct
  source 1..19: mol_type = other RNA
aactcgcggctctagggaa

SEQ ID NO: 933 - RNA, 19 nt, synthetic construct
  source 1..19: mol_type = other RNA
ttccctagagccgcgagtt

SEQ ID NO: 934 - RNA, 19 nt, synthetic construct
  source 1..19: mol_type = other RNA
actcgcggctctagggaag

SEQ ID NO: 935 - RNA, 19 nt, synthetic construct
  source 1..19: mol_type = other RNA
cttccctagagccgcgagt

SEQ ID NO: 936 - RNA, 19 nt, synthetic construct
  source 1..19: mol_type = other RNA
ctagggaaggccacagacc

SEQ ID NO: 937 - RNA, 19 nt, synthetic construct
  source 1..19: mol_type = other RNA
ggtctgtggccttccctag

SEQ ID NO: 938 - RNA, 19 nt, synthetic construct
  source 1..19: mol_type = other RNA
tagggaaggccacagacct

SEQ ID NO: 939 - RNA, 19 nt, synthetic construct
  source 1..19: mol_type = other RNA
aggtctgtggccttcccta

SEQ ID NO: 940 - RNA, 19 nt, synthetic construct
  source 1..19: mol_type = other RNA
agggaaggccacagacctc

SEQ ID NO: 941 - RNA, 19 nt, synthetic construct
  source 1..19: mol_type = other RNA
gaggtctgtggccttccct

SEQ ID NO: 942 - RNA, 19 nt, synthetic construct
  source 1..19: mol_type = other RNA
gggaaggccacagacctca

SEQ ID NO: 943 - RNA, 19 nt, synthetic construct
  source 1..19: mol_type = other RNA
tgaggtctgtggccttccc

SEQ ID NO: 944 - RNA, 19 nt, synthetic construct
  source 1..19: mol_type = other RNA
ggaaggccacagacctcag

SEQ ID NO: 945 - RNA, 19 nt, synthetic construct
  source 1..19: mol_type = other RNA
ctgaggtctgtggccttcc

SEQ ID NO: 946 - RNA, 19 nt, synthetic construct
  source 1..19: mol_type = other RNA
cagacctcagctgtacgag

SEQ ID NO: 947 - RNA, 19 nt, synthetic construct
  source 1..19: mol_type = other RNA
ctcgtacagctgaggtctg

SEQ ID NO: 948 - RNA, 19 nt, synthetic construct
  source 1..19: mol_type = other RNA
agacctcagctgtacgagc

SEQ ID NO: 949 - RNA, 19 nt, synthetic construct
  source 1..19: mol_type = other RNA
gctcgtacagctgaggtct

SEQ ID NO: 950 - RNA, 19 nt, synthetic construct
  source 1..19: mol_type = other RNA
gacctcagctgtacgagcg

SEQ ID NO: 951 - RNA, 19 nt, synthetic construct
  source 1..19: mol_type = other RNA
cgctcgtacagctgaggtc

SEQ ID NO: 952 - RNA, 19 nt, synthetic construct
  source 1..19: mol_type = other RNA
acctcagctgtacgagcgg

SEQ ID NO: 953 - RNA, 19 nt, synthetic construct
  source 1..19: mol_type = other RNA
ccgctcgtacagctgaggt

SEQ ID NO: 954 - RNA, 19 nt, synthetic construct
  source 1..19: mol_type = other RNA
cctcagctgtacgagcgga

SEQ ID NO: 955 - RNA, 19 nt, synthetic construct
  source 1..19: mol_type = other RNA
tccgctcgtacagctgagg

SEQ ID NO: 956 - RNA, 19 nt, synthetic construct
  source 1..19: mol_type = other RNA
ctcagctgtacgagcggaa

SEQ ID NO: 957 - RNA, 19 nt, synthetic construct
  source 1..19: mol_type = other RNA
ttccgctcgtacagctgag

SEQ ID NO: 958 - RNA, 19 nt, synthetic construct
  source 1..19: mol_type = other RNA
cctcggccactactgtctg

SEQ ID NO: 959 - RNA, 19 nt, synthetic construct
  source 1..19: mol_type = other RNA
cagacagtagtggccgagg

SEQ ID NO: 960 - RNA, 19 nt, synthetic construct
  source 1..19: mol_type = other RNA
ctcggccactactgtctgc

SEQ ID NO: 961 - RNA, 19 nt, synthetic construct
  source 1..19: mol_type = other RNA
gcagacagtagtggccgag

SEQ ID NO: 962 - RNA, 19 nt, synthetic construct
  source 1..19: mol_type = other RNA
tcggccactactgtctgcg

SEQ ID NO: 963 - RNA, 19 nt, synthetic construct
  source 1..19: mol_type = other RNA
cgcagacagtagtggccga

SEQ ID NO: 964 - RNA, 19 nt, synthetic construct
  source 1..19: mol_type = other RNA
cggccactactgtctgcga

SEQ ID NO: 965 - RNA, 19 nt, synthetic construct
  source 1..19: mol_type = other RNA
tcgcagacagtagtggccg

SEQ ID NO: 966 - RNA, 19 nt, synthetic construct
  source 1..19: mol_type = other RNA
ggccactactgtctgcgag

SEQ ID NO: 967 - RNA, 19 nt, synthetic construct
  source 1..19: mol_type = other RNA
ctcgcagacagtagtggcc

SEQ ID NO: 968 - RNA, 19 nt, synthetic construct
  source 1..19: mol_type = other RNA
gccactactgtctgcgagc

SEQ ID NO: 969 - RNA, 19 nt, synthetic construct
  source 1..19: mol_type = other RNA
gctcgcagacagtagtggc

SEQ ID NO: 970 - RNA, 19 nt, synthetic construct
  source 1..19: mol_type = other RNA
ccactactgtctgcgagcc

SEQ ID NO: 971 - RNA, 19 nt, synthetic construct
  source 1..19: mol_type = other RNA
ggctcgcagacagtagtgg

SEQ ID NO: 972 - RNA, 19 nt, synthetic construct
  source 1..19: mol_type = other RNA
cactactgtctgcgagccc

SEQ ID NO: 973 - RNA, 19 nt, synthetic construct
  source 1..19: mol_type = other RNA
gggctcgcagacagtagtg

SEQ ID NO: 974 - RNA, 19 nt, synthetic construct
  source 1..19: mol_type = other RNA
actactgtctgcgagcccg

SEQ ID NO: 975 - RNA, 19 nt, synthetic construct
  source 1..19: mol_type = other RNA
cgggctcgcagacagtagt

SEQ ID NO: 976 - RNA, 19 nt, synthetic construct
  source 1..19: mol_type = other RNA
ctactgtctgcgagcccga

SEQ ID NO: 977 - RNA, 19 nt, synthetic construct
  source 1..19: mol_type = other RNA
tcgggctcgcagacagtag

SEQ ID NO: 978 - RNA, 19 nt, synthetic construct
  source 1..19: mol_type = other RNA
tactgtctgcgagcccgag

SEQ ID NO: 979 - RNA, 19 nt, synthetic construct
  source 1..19: mol_type = other RNA
ctcgggctcgcagacagta

SEQ ID NO: 980 - RNA, 19 nt, synthetic construct
  source 1..19: mol_type = other RNA
ggtcgctactgctcctctc

SEQ ID NO: 981 - RNA, 19 nt, synthetic construct
  source 1..19: mol_type = other RNA
gagaggagcagtagcgacc

SEQ ID NO: 982 - RNA, 19 nt, synthetic construct
  source 1..19: mol_type = other RNA
tgctcctctcctcagccct

SEQ ID NO: 983 - RNA, 19 nt, synthetic construct
  source 1..19: mol_type = other RNA
agggctgaggagaggagca

SEQ ID NO: 984 - RNA, 19 nt, synthetic construct
  source 1..19: mol_type = other RNA
acacgctgccgcacttcct

SEQ ID NO: 985 - RNA, 19 nt, synthetic construct
  source 1..19: mol_type = other RNA
aggaagtgcggcagcgtgt

SEQ ID NO: 986 - RNA, 19 nt, synthetic construct
  source 1..19: mol_type = other RNA
acttcctcggctgcctgga

SEQ ID NO: 987 - RNA, 19 nt, synthetic construct
  source 1..19: mol_type = other RNA
tccaggcagccgaggaagt

SEQ ID NO: 988 - RNA, 19 nt, synthetic construct
  source 1..19: mol_type = other RNA
cccaagagcaggatggcca

SEQ ID NO: 989 - RNA, 19 nt, synthetic construct
  source 1..19: mol_type = other RNA
tggccatcctgctcttggg

SEQ ID NO: 990 - RNA, 19 nt, synthetic construct
  source 1..19: mol_type = other RNA
ccaagagcaggatggccat

SEQ ID NO: 991 - RNA, 19 nt, synthetic construct
  source 1..19: mol_type = other RNA
atggccatcctgctcttgg

SEQ ID NO: 992 - RNA, 19 nt, synthetic construct
  source 1..19: mol_type = other RNA
caagagcaggatggccatc

SEQ ID NO: 993 - RNA, 19 nt, synthetic construct
  source 1..19: mol_type = other RNA
gatggccatcctgctcttg

SEQ ID NO: 994 - RNA, 19 nt, synthetic construct
  source 1..19: mol_type = other RNA
aagagcaggatggccatct

SEQ ID NO: 995 - RNA, 19 nt, synthetic construct
  source 1..19: mol_type = other RNA
agatggccatcctgctctt

SEQ ID NO: 996 - RNA, 19 nt, synthetic construct
  source 1..19: mol_type = other RNA
caggatggccatctgggca

SEQ ID NO: 997 - RNA, 19 nt, synthetic construct
  source 1..19: mol_type = other RNA
tgcccagatggccatcctg

SEQ ID NO: 998 - RNA, 19 nt, synthetic construct
  source 1..19: mol_type = other RNA
aaatattcagggagtggtt

SEQ ID NO: 999 - RNA, 19 nt, synthetic construct
  source 1..19: mol_type = other RNA
aaccactccctgaatattt

SEQ ID NO: 1000 - RNA, 19 nt, synthetic construct
  source 1..19: mol_type = other RNA
aatattcagggagtggttg

SEQ ID NO: 1001 - RNA, 19 nt, synthetic construct
  source 1..19: mol_type = other RNA
caaccactccctgaatatt

SEQ ID NO: 1002 - RNA, 19 nt, synthetic construct
  source 1..19: mol_type = other RNA
atattcagggagtggttga

SEQ ID NO: 1003 - RNA, 19 nt, synthetic construct
  source 1..19: mol_type = other RNA
tcaaccactccctgaatat

SEQ ID NO: 1004 - RNA, 19 nt, synthetic construct
  source 1..19: mol_type = other RNA
gactctatcactatgtgga

SEQ ID NO: 1005 - RNA, 19 nt, synthetic construct
  source 1..19: mol_type = other RNA
tccacatagtgatagagtc

SEQ ID NO: 1006 - RNA, 19 nt, synthetic construct
  source 1..19: mol_type = other RNA
actctatcactatgtggag

SEQ ID NO: 1007 - RNA, 19 nt, synthetic construct
  source 1..19: mol_type = other RNA
ctccacatagtgatagagt

SEQ ID NO: 1008 - RNA, 19 nt, synthetic construct
  source 1..19: mol_type = other RNA
ctatgtggagtggaggcct

SEQ ID NO: 1009 - RNA, 19 nt, synthetic construct
  source 1..19: mol_type = other RNA
aggcctccactccacatag

SEQ ID NO: 1010 - RNA, 19 nt, synthetic construct
  source 1..19: mol_type = other RNA
tatgtggagtggaggccta

SEQ ID NO: 1011 - RNA, 19 nt, synthetic construct
  source 1..19: mol_type = other RNA
taggcctccactccacata

SEQ ID NO: 1012 - RNA, 19 nt, synthetic construct
  source 1..19: mol_type = other RNA
atgtggagtggaggcctat

SEQ ID NO: 1013 - RNA, 19 nt, synthetic construct
  source 1..19: mol_type = other RNA
ataggcctccactccacat

SEQ ID NO: 1014 - RNA, 19 nt, synthetic construct
  source 1..19: mol_type = other RNA
tgtggagtggaggcctatg

SEQ ID NO: 1015 - RNA, 19 nt, synthetic construct
  source 1..19: mol_type = other RNA
cataggcctccactccaca

SEQ ID NO: 1016 - RNA, 19 nt, synthetic construct
  source 1..19: mol_type = other RNA
gtggagtggaggcctatgg

SEQ ID NO: 1017 - RNA, 19 nt, synthetic construct
  source 1..19: mol_type = other RNA
ccataggcctccactccac

SEQ ID NO: 1018 - RNA, 19 nt, synthetic construct
  source 1..19: mol_type = other RNA
tggagtggaggcctatgga

SEQ ID NO: 1019 - RNA, 19 nt, synthetic construct
  source 1..19: mol_type = other RNA
tccataggcctccactcca

SEQ ID NO: 1020 - RNA, 19 nt, synthetic construct
  source 1..19: mol_type = other RNA
ggagtggaggcctatggat

SEQ ID NO: 1021 - RNA, 19 nt, synthetic construct
  source 1..19: mol_type = other RNA
atccataggcctccactcc

SEQ ID NO: 1022 - RNA, 19 nt, synthetic construct
  source 1..19: mol_type = other RNA
gagtggaggcctatggatg

SEQ ID NO: 1023 - RNA, 19 nt, synthetic construct
  source 1..19: mol_type = other RNA
catccataggcctccactc

SEQ ID NO: 1024 - RNA, 19 nt, synthetic construct
  source 1..19: mol_type = other RNA
agtggaggcctatggatga

SEQ ID NO: 1025 - RNA, 19 nt, synthetic construct
  source 1..19: mol_type = other RNA
tcatccataggcctccact

SEQ ID NO: 1026 - RNA, 19 nt, synthetic construct
  source 1..19: mol_type = other RNA
gtggaggcctatggatgaa

SEQ ID NO: 1027 - RNA, 19 nt, synthetic construct
  source 1..19: mol_type = other RNA
ttcatccataggcctccac

SEQ ID NO: 1028 - RNA, 19 nt, synthetic construct
  source 1..19: mol_type = other RNA
aaccagagtcttaccctga

SEQ ID NO: 1029 - RNA, 19 nt, synthetic construct
  source 1..19: mol_type = other RNA
tcagggtaagactctggtt

SEQ ID NO: 1030 - RNA, 19 nt, synthetic construct
  source 1..19: mol_type = other RNA
accagagtcttaccctgat

SEQ ID NO: 1031 - RNA, 19 nt, synthetic construct
  source 1..19: mol_type = other RNA
atcagggtaagactctggt

SEQ ID NO: 1032 - RNA, 19 nt, synthetic construct
  source 1..19: mol_type = other RNA
ccagagtcttaccctgatg

SEQ ID NO: 1033 - RNA, 19 nt, synthetic construct
  source 1..19: mol_type = other RNA
catcagggtaagactctgg

SEQ ID NO: 1034 - RNA, 19 nt, synthetic construct
  source 1..19: mol_type = other RNA
cagagtcttaccctgatga

SEQ ID NO: 1035 - RNA, 19 nt, synthetic construct
  source 1..19: mol_type = other RNA
tcatcagggtaagactctg

SEQ ID NO: 1036 - RNA, 19 nt, synthetic construct
  source 1..19: mol_type = other RNA
agagtcttaccctgatgaa

SEQ ID NO: 1037 - RNA, 19 nt, synthetic construct
  source 1..19: mol_type = other RNA
ttcatcagggtaagactct

SEQ ID NO: 1038 - RNA, 19 nt, synthetic construct
  source 1..19: mol_type = other RNA
tggaccaaagcactggcca

SEQ ID NO: 1039 - RNA, 19 nt, synthetic construct
  source 1..19: mol_type = other RNA
tggccagtgctttggtcca

SEQ ID NO: 1040 - RNA, 19 nt, synthetic construct
  source 1..19: mol_type = other RNA
ggaccaaagcactggccaa

SEQ ID NO: 1041 - RNA, 19 nt, synthetic construct
  source 1..19: mol_type = other RNA
ttggccagtgctttggtcc

SEQ ID NO: 1042 - RNA, 19 nt, synthetic construct
  source 1..19: mol_type = other RNA
acctcccggtttgcccatg

SEQ ID NO: 1043 - RNA, 19 nt, synthetic construct
  source 1..19: mol_type = other RNA
catgggcaaaccgggaggt

SEQ ID NO: 1044 - RNA, 19 nt, synthetic construct
  source 1..19: mol_type = other RNA
cctcccggtttgcccatgt

SEQ ID NO: 1045 - RNA, 19 nt, synthetic construct
  source 1..19: mol_type = other RNA
acatgggcaaaccgggagg

SEQ ID NO: 1046 - RNA, 19 nt, synthetic construct
  source 1..19: mol_type = other RNA
ctcccggtttgcccatgtg

SEQ ID NO: 1047 - RNA, 19 nt, synthetic construct
  source 1..19: mol_type = other RNA
cacatgggcaaaccgggag

SEQ ID NO: 1048 - RNA, 19 nt, synthetic construct
  source 1..19: mol_type = other RNA
cggtttgcccatgtgatga

SEQ ID NO: 1049 - RNA, 19 nt, synthetic construct
  source 1..19: mol_type = other RNA
tcatcacatgggcaaaccg

SEQ ID NO: 1050 - RNA, 19 nt, synthetic construct
  source 1..19: mol_type = other RNA
ggtttgcccatgtgatgaa

SEQ ID NO: 1051 - RNA, 19 nt, synthetic construct
  source 1..19: mol_type = other RNA
ttcatcacatgggcaaacc

SEQ ID NO: 1052 - RNA, 19 nt, synthetic construct
  source 1..19: mol_type = other RNA
actacgacaggcagccctt

SEQ ID NO: 1053 - RNA, 19 nt, synthetic construct
  source 1..19: mol_type = other RNA
aagggctgcctgtcgtagt

SEQ ID NO: 1054 - RNA, 19 nt, synthetic construct
  source 1..19: mol_type = other RNA
ctacgacaggcagcccttc

SEQ ID NO: 1055 - RNA, 19 nt, synthetic construct
  source 1..19: mol_type = other RNA
gaagggctgcctgtcgtag

SEQ ID NO: 1056 - RNA, 19 nt, synthetic construct
  source 1..19: mol_type = other RNA
tacgacaggcagcccttcg

SEQ ID NO: 1057 - RNA, 19 nt, synthetic construct
  source 1..19: mol_type = other RNA
cgaagggctgcctgtcgta

SEQ ID NO: 1058 - RNA, 19 nt, synthetic construct
  source 1..19: mol_type = other RNA
acgacaggcagcccttcga

SEQ ID NO: 1059 - RNA, 19 nt, synthetic construct
  source 1..19: mol_type = other RNA
tcgaagggctgcctgtcgt

SEQ ID NO: 1060 - RNA, 19 nt, synthetic construct
  source 1..19: mol_type = other RNA
cgacaggcagcccttcgaa

SEQ ID NO: 1061 - RNA, 19 nt, synthetic construct
  source 1..19: mol_type = other RNA
ttcgaagggctgcctgtcg

SEQ ID NO: 1062 - RNA, 19 nt, synthetic construct
  source 1..19: mol_type = other RNA
agactacattctgttcata

SEQ ID NO: 1063 - RNA, 19 nt, synthetic construct
  source 1..19: mol_type = other RNA
tatgaacagaatgtagtct

SEQ ID NO: 1064 - RNA, 19 nt, synthetic construct
  source 1..19: mol_type = other RNA
gactacattctgttcatag

SEQ ID NO: 1065 - RNA, 19 nt, synthetic construct
  source 1..19: mol_type = other RNA
ctatgaacagaatgtagtc

SEQ ID NO: 1066 - RNA, 19 nt, synthetic construct
  source 1..19: mol_type = other RNA
actacattctgttcataga

SEQ ID NO: 1067 - RNA, 19 nt, synthetic construct
  source 1..19: mol_type = other RNA
tctatgaacagaatgtagt

SEQ ID NO: 1068 - RNA, 19 nt, synthetic construct
  source 1..19: mol_type = other RNA
ctacattctgttcatagat

SEQ ID NO: 1069 - RNA, 19 nt, synthetic construct
  source 1..19: mol_type = other RNA
atctatgaacagaatgtag

SEQ ID NO: 1070 - RNA, 19 nt, synthetic construct
  source 1..19: mol_type = other RNA
tacattctgttcatagatg

SEQ ID NO: 1071 - RNA, 19 nt, synthetic construct
  source 1..19: mol_type = other RNA
catctatgaacagaatgta

SEQ ID NO: 1072 - RNA, 19 nt, synthetic construct
  source 1..19: mol_type = other RNA
cattctgttcatagatgtt

SEQ ID NO: 1073 - RNA, 19 nt, synthetic construct
  source 1..19: mol_type = other RNA
aacatctatgaacagaatg

SEQ ID NO: 1074 - RNA, 19 nt, synthetic construct
  source 1..19: mol_type = other RNA
attctgttcatagatgttg

SEQ ID NO: 1075 - RNA, 19 nt, synthetic construct
  source 1..19: mol_type = other RNA
caacatctatgaacagaat

SEQ ID NO: 1076 - RNA, 19 nt, synthetic construct
  source 1..19: mol_type = other RNA
caatttcctgactaatcca

SEQ ID NO: 1077 - RNA, 19 nt, synthetic construct
  source 1..19: mol_type = other RNA
tggattagtcaggaaattg

SEQ ID NO: 1078 - RNA, 19 nt, synthetic construct
  source 1..19: mol_type = other RNA
aatttcctgactaatccac

SEQ ID NO: 1079 - RNA, 19 nt, synthetic construct
  source 1..19: mol_type = other RNA
gtggattagtcaggaaatt

SEQ ID NO: 1080 - RNA, 19 nt, synthetic construct
  source 1..19: mol_type = other RNA
atttcctgactaatccaca

SEQ ID NO: 1081 - RNA, 19 nt, synthetic construct
  source 1..19: mol_type = other RNA
tgtggattagtcaggaaat

SEQ ID NO: 1082 - RNA, 19 nt, synthetic construct
  source 1..19: mol_type = other RNA
cctgactaatccacagacc

SEQ ID NO: 1083 - RNA, 19 nt, synthetic construct
  source 1..19: mol_type = other RNA
ggtctgtggattagtcagg

SEQ ID NO: 1084 - RNA, 19 nt, synthetic construct
  source 1..19: mol_type = other RNA
actaatccacagaccctca

SEQ ID NO: 1085 - RNA, 19 nt, synthetic construct
  source 1..19: mol_type = other RNA
tgagggtctgtggattagt

SEQ ID NO: 1086 - RNA, 19 nt, synthetic construct
  source 1..19: mol_type = other RNA
ctaatccacagaccctcaa

SEQ ID NO: 1087 - RNA, 19 nt, synthetic construct
  source 1..19: mol_type = other RNA
ttgagggtctgtggattag

SEQ ID NO: 1088 - RNA, 19 nt, synthetic construct
  source 1..19: mol_type = other RNA
taatccacagaccctcaat

SEQ ID NO: 1089 - RNA, 19 nt, synthetic construct
  source 1..19: mol_type = other RNA
attgagggtctgtggatta

SEQ ID NO: 1090 - RNA, 19 nt, synthetic construct
  source 1..19: mol_type = other RNA
aatccacagaccctcaatc

SEQ ID NO: 1091 - RNA, 19 nt, synthetic construct
  source 1..19: mol_type = other RNA
gattgagggtctgtggatt

SEQ ID NO: 1092 - RNA, 19 nt, synthetic construct
  source 1..19: mol_type = other RNA
atccacagaccctcaatct

SEQ ID NO: 1093 - RNA, 19 nt, synthetic construct
  source 1..19: mol_type = other RNA
agattgagggtctgtggat

SEQ ID NO: 1094 - RNA, 19 nt, synthetic construct
  source 1..19: mol_type = other RNA
tccacagaccctcaatcta

SEQ ID NO: 1095 - RNA, 19 nt, synthetic construct
  source 1..19: mol_type = other RNA
tagattgagggtctgtgga

SEQ ID NO: 1096 - RNA, 19 nt, synthetic construct
  source 1..19: mol_type = other RNA
gggcctgtattctaatttc

SEQ ID NO: 1097 - RNA, 19 nt, synthetic construct
  source 1..19: mol_type = other RNA
gaaattagaatacaggccc

SEQ ID NO: 1098 - RNA, 19 nt, synthetic construct
  source 1..19: mol_type = other RNA
ggcctgtattctaatttct

SEQ ID NO: 1099 - RNA, 19 nt, synthetic construct
  source 1..19: mol_type = other RNA
agaaattagaatacaggcc

SEQ ID NO: 1100 - RNA, 19 nt, synthetic construct
  source 1..19: mol_type = other RNA
gcctgtattctaatttctg

SEQ ID NO: 1101 - RNA, 19 nt, synthetic construct
  source 1..19: mol_type = other RNA
cagaaattagaatacaggc

SEQ ID NO: 1102 - RNA, 19 nt, synthetic construct
  source 1..19: mol_type = other RNA
cctgtattctaatttctgg

SEQ ID NO: 1103 - RNA, 19 nt, synthetic construct
  source 1..19: mol_type = other RNA
ccagaaattagaatacagg

SEQ ID NO: 1104 - RNA, 19 nt, synthetic construct
  source 1..19: mol_type = other RNA
ctgtattctaatttctggt

SEQ ID NO: 1105 - RNA, 19 nt, synthetic construct
  source 1..19: mol_type = other RNA
accagaaattagaatacag

SEQ ID NO: 1106 - RNA, 19 nt, synthetic construct
  source 1..19: mol_type = other RNA
tgtattctaatttctggtg

SEQ ID NO: 1107 - RNA, 19 nt, synthetic construct
  source 1..19: mol_type = other RNA
caccagaaattagaataca

SEQ ID NO: 1108 - RNA, 19 nt, synthetic construct
  source 1..19: mol_type = other RNA
ttctaatttctggtgcgga

SEQ ID NO: 1109 - RNA, 19 nt, synthetic construct
  source 1..19: mol_type = other RNA
tccgcaccagaaattagaa

SEQ ID NO: 1110 - RNA, 19 nt, synthetic construct
  source 1..19: mol_type = other RNA
tctaatttctggtgcggaa

SEQ ID NO: 1111 - RNA, 19 nt, synthetic construct
  source 1..19: mol_type = other RNA
ttccgcaccagaaattaga

SEQ ID NO: 1112 - RNA, 19 nt, synthetic construct
  source 1..19: mol_type = other RNA
ctaatttctggtgcggaat

SEQ ID NO: 1113 - RNA, 19 nt, synthetic construct
  source 1..19: mol_type = other RNA
attccgcaccagaaattag

SEQ ID NO: 1114 - RNA, 19 nt, synthetic construct
  source 1..19: mol_type = other RNA
taatttctggtgcggaatc

SEQ ID NO: 1115 - RNA, 19 nt, synthetic construct
  source 1..19: mol_type = other RNA
gattccgcaccagaaatta

SEQ ID NO: 1116 - RNA, 19 nt, synthetic construct
  source 1..19: mol_type = other RNA
aatttctggtgcggaatca

SEQ ID NO: 1117 - RNA, 19 nt, synthetic construct
  source 1..19: mol_type = other RNA
tgattccgcaccagaaatt

SEQ ID NO: 1118 - RNA, 19 nt, synthetic construct
  source 1..19: mol_type = other RNA
atttctggtgcggaatcac

SEQ ID NO: 1119 - RNA, 19 nt, synthetic construct
  source 1..19: mol_type = other RNA
gtgattccgcaccagaaat

SEQ ID NO: 1120 - RNA, 19 nt, synthetic construct
  source 1..19: mol_type = other RNA
cccagactacgttcagatt

SEQ ID NO: 1121 - RNA, 19 nt, synthetic construct
  source 1..19: mol_type = other RNA
aatctgaacgtagtctggg

SEQ ID NO: 1122 - RNA, 19 nt, synthetic construct
  source 1..19: mol_type = other RNA
ccagactacgttcagattc

SEQ ID NO: 1123 - RNA, 19 nt, synthetic construct
  source 1..19: mol_type = other RNA
gaatctgaacgtagtctgg

SEQ ID NO: 1124 - RNA, 19 nt, synthetic construct
  source 1..19: mol_type = other RNA
cagactacgttcagattcg

SEQ ID NO: 1125 - RNA, 19 nt, synthetic construct
  source 1..19: mol_type = other RNA
cgaatctgaacgtagtctg

SEQ ID NO: 1126 - RNA, 19 nt, synthetic construct
  source 1..19: mol_type = other RNA
agactacgttcagattcga

SEQ ID NO: 1127 - RNA, 19 nt, synthetic construct
  source 1..19: mol_type = other RNA
tcgaatctgaacgtagtct

SEQ ID NO: 1128 - RNA, 19 nt, synthetic construct
  source 1..19: mol_type = other RNA
gactacgttcagattcgag

SEQ ID NO: 1129 - RNA, 19 nt, synthetic construct
  source 1..19: mol_type = other RNA
ctcgaatctgaacgtagtc

SEQ ID NO: 1130 - RNA, 19 nt, synthetic construct
  source 1..19: mol_type = other RNA
gaatggaagaggacaggct

SEQ ID NO: 1131 - RNA, 19 nt, synthetic construct
  source 1..19: mol_type = other RNA
agcctgtcctcttccattc

SEQ ID NO: 1132 - RNA, 19 nt, synthetic construct
  source 1..19: mol_type = other RNA
aatggaagaggacaggctg

SEQ ID NO: 1133 - RNA, 19 nt, synthetic construct
  source 1..19: mol_type = other RNA
cagcctgtcctcttccatt

SEQ ID NO: 1134 - RNA, 19 nt, synthetic construct
  source 1..19: mol_type = other RNA
aagaggacaggctgcttcc

SEQ ID NO: 1135 - RNA, 19 nt, synthetic construct
  source 1..19: mol_type = other RNA
ggaagcagcctgtcctctt

SEQ ID NO: 1136 - RNA, 19 nt, synthetic construct
  source 1..19: mol_type = other RNA
gtccactccaccttcctaa

SEQ ID NO: 1137 - RNA, 19 nt, synthetic construct
  source 1..19: mol_type = other RNA
ttaggaaggtggagtggac

SEQ ID NO: 1138 - RNA, 19 nt, synthetic construct
  source 1..19: mol_type = other RNA
tccactccaccttcctaat

SEQ ID NO: 1139 - RNA, 19 nt, synthetic construct
  source 1..19: mol_type = other RNA
attaggaaggtggagtgga

SEQ ID NO: 1140 - RNA, 19 nt, synthetic construct
  source 1..19: mol_type = other RNA
ccactccaccttcctaatt

SEQ ID NO: 1141 - RNA, 19 nt, synthetic construct
  source 1..19: mol_type = other RNA
aattaggaaggtggagtgg

SEQ ID NO: 1142 - RNA, 19 nt, synthetic construct
  source 1..19: mol_type = other RNA
cactccaccttcctaattg

SEQ ID NO: 1143 - RNA, 19 nt, synthetic construct
  source 1..19: mol_type = other RNA
caattaggaaggtggagtg

SEQ ID NO: 1144 - RNA, 19 nt, synthetic construct
  source 1..19: mol_type = other RNA
actccaccttcctaattga

SEQ ID NO: 1145 - RNA, 19 nt, synthetic construct
  source 1..19: mol_type = other RNA
tcaattaggaaggtggagt

SEQ ID NO: 1146 - RNA, 19 nt, synthetic construct
  source 1..19: mol_type = other RNA
ctccaccttcctaattgac

SEQ ID NO: 1147 - RNA, 19 nt, synthetic construct
  source 1..19: mol_type = other RNA
gtcaattaggaaggtggag

SEQ ID NO: 1148 - RNA, 19 nt, synthetic construct
  source 1..19: mol_type = other RNA
tccaccttcctaattgacc

SEQ ID NO: 1149 - RNA, 19 nt, synthetic construct
  source 1..19: mol_type = other RNA
ggtcaattaggaaggtgga

SEQ ID NO: 1150 - RNA, 19 nt, synthetic construct
  source 1..19: mol_type = other RNA
ccttcctaattgacctcag

SEQ ID NO: 1151 - RNA, 19 nt, synthetic construct
  source 1..19: mol_type = other RNA
ctgaggtcaattaggaagg

SEQ ID NO: 1152 - RNA, 19 nt, synthetic construct
  source 1..19: mol_type = other RNA
cttcctaattgacctcagg

SEQ ID NO: 1153 - RNA, 19 nt, synthetic construct
  source 1..19: mol_type = other RNA
cctgaggtcaattaggaag

SEQ ID NO: 1154 - RNA, 19 nt, synthetic construct
  source 1..19: mol_type = other RNA
ctaattgacctcaggaagg

SEQ ID NO: 1155 - RNA, 19 nt, synthetic construct
  source 1..19: mol_type = other RNA
ccttcctgaggtcaattag

SEQ ID NO: 1156 - RNA, 19 nt, synthetic construct
  source 1..19: mol_type = other RNA
aattgacctcaggaaggag

SEQ ID NO: 1157 - RNA, 19 nt, synthetic construct
  source 1..19: mol_type = other RNA
ctccttcctgaggtcaatt

SEQ ID NO: 1158 - RNA, 19 nt, synthetic construct
  source 1..19: mol_type = other RNA
tcaggaaggaggcctcgga

SEQ ID NO: 1159 - RNA, 19 nt, synthetic construct
  source 1..19: mol_type = other RNA
tccgaggcctccttcctga

SEQ ID NO: 1160 - RNA, 19 nt, synthetic construct
  source 1..19: mol_type = other RNA
aggaaggaggcctcggaca

SEQ ID NO: 1161 - RNA, 19 nt, synthetic construct
  source 1..19: mol_type = other RNA
tgtccgaggcctccttcct

SEQ ID NO: 1162 - RNA, 19 nt, synthetic construct
  source 1..19: mol_type = other RNA
cccacaccaggactacacc

SEQ ID NO: 1163 - RNA, 19 nt, synthetic construct
  source 1..19: mol_type = other RNA
ggtgtagtcctggtgtggg

SEQ ID NO: 1164 - RNA, 19 nt, synthetic construct
  source 1..19: mol_type = other RNA
ccacaccaggactacacct

SEQ ID NO: 1165 - RNA, 19 nt, synthetic construct
  source 1..19: mol_type = other RNA
aggtgtagtcctggtgtgg

SEQ ID NO: 1166 - RNA, 19 nt, synthetic construct
  source 1..19: mol_type = other RNA
aggactacacctggacctt

SEQ ID NO: 1167 - RNA, 19 nt, synthetic construct
  source 1..19: mol_type = other RNA
aaggtccaggtgtagtcct

SEQ ID NO: 1168 - RNA, 19 nt, synthetic construct
  source 1..19: mol_type = other RNA
ggactacacctggaccttt

SEQ ID NO: 1169 - RNA, 19 nt, synthetic construct
  source 1..19: mol_type = other RNA
aaaggtccaggtgtagtcc

SEQ ID NO: 1170 - RNA, 19 nt, synthetic construct
  source 1..19: mol_type = other RNA
actacacctggacctttga

SEQ ID NO: 1171 - RNA, 19 nt, synthetic construct
  source 1..19: mol_type = other RNA
tcaaaggtccaggtgtagt

SEQ ID NO: 1172 - RNA, 19 nt, synthetic construct
  source 1..19: mol_type = other RNA
ctacacctggacctttgat

SEQ ID NO: 1173 - RNA, 19 nt, synthetic construct
  source 1..19: mol_type = other RNA
atcaaaggtccaggtgtag

SEQ ID NO: 1174 - RNA, 19 nt, synthetic construct
  source 1..19: mol_type = other RNA
tacacctggacctttgatg

SEQ ID NO: 1175 - RNA, 19 nt, synthetic construct
  source 1..19: mol_type = other RNA
catcaaaggtccaggtgta

SEQ ID NO: 1176 - RNA, 19 nt, synthetic construct
  source 1..19: mol_type = other RNA
acacctggacctttgatga

SEQ ID NO: 1177 - RNA, 19 nt, synthetic construct
  source 1..19: mol_type = other RNA
tcatcaaaggtccaggtgt

SEQ ID NO: 1178 - RNA, 19 nt, synthetic construct
  source 1..19: mol_type = other RNA
cacctggacctttgatgac

SEQ ID NO: 1179 - RNA, 19 nt, synthetic construct
  source 1..19: mol_type = other RNA
gtcatcaaaggtccaggtg

SEQ ID NO: 1180 - RNA, 19 nt, synthetic construct
  source 1..19: mol_type = other RNA
acctggacctttgatgaca

SEQ ID NO: 1181 - RNA, 19 nt, synthetic construct
  source 1..19: mol_type = other RNA
tgtcatcaaaggtccaggt

SEQ ID NO: 1182 - RNA, 19 nt, synthetic construct
  source 1..19: mol_type = other RNA
cctggacctttgatgacat

SEQ ID NO: 1183 - RNA, 19 nt, synthetic construct
  source 1..19: mol_type = other RNA
atgtcatcaaaggtccagg

SEQ ID NO: 1184 - RNA, 19 nt, synthetic construct
  source 1..19: mol_type = other RNA
tcattgtctttgccttctc

SEQ ID NO: 1185 - RNA, 19 nt, synthetic construct
  source 1..19: mol_type = other RNA
gagaaggcaaagacaatga

SEQ ID NO: 1186 - RNA, 19 nt, synthetic construct
  source 1..19: mol_type = other RNA
cattgtctttgccttctcc

SEQ ID NO: 1187 - RNA, 19 nt, synthetic construct
  source 1..19: mol_type = other RNA
ggagaaggcaaagacaatg

SEQ ID NO: 1188 - RNA, 19 nt, synthetic construct
  source 1..19: mol_type = other RNA
attgtctttgccttctcca

SEQ ID NO: 1189 - RNA, 19 nt, synthetic construct
  source 1..19: mol_type = other RNA
tggagaaggcaaagacaat

SEQ ID NO: 1190 - RNA, 19 nt, synthetic construct
  source 1..19: mol_type = other RNA
tgtctttgccttctccagc

SEQ ID NO: 1191 - RNA, 19 nt, synthetic construct
  source 1..19: mol_type = other RNA
gctggagaaggcaaagaca

SEQ ID NO: 1192 - RNA, 19 nt, synthetic construct
  source 1..19: mol_type = other RNA
gtctttgccttctccagca

SEQ ID NO: 1193 - RNA, 19 nt, synthetic construct
  source 1..19: mol_type = other RNA
tgctggagaaggcaaagac

SEQ ID NO: 1194 - RNA, 19 nt, synthetic construct
  source 1..19: mol_type = other RNA
cttctccagcaggcaagca

SEQ ID NO: 1195 - RNA, 19 nt, synthetic construct
  source 1..19: mol_type = other RNA
tgcttgcctgctggagaag

SEQ ID NO: 1196 - RNA, 19 nt, synthetic construct
  source 1..19: mol_type = other RNA
gcaggcaagcaggcatcca

SEQ ID NO: 1197 - RNA, 19 nt, synthetic construct
  source 1..19: mol_type = other RNA
tggatgcctgcttgcctgc

SEQ ID NO: 1198 - RNA, 19 nt, synthetic construct
  source 1..19: mol_type = other RNA
caggcaagcaggcatccag

SEQ ID NO: 1199 - RNA, 19 nt, synthetic construct
  source 1..19: mol_type = other RNA
ctggatgcctgcttgcctg

SEQ ID NO: 1200 - RNA, 19 nt, synthetic construct
  source 1..19: mol_type = other RNA
aggcaagcaggcatccaga

SEQ ID NO: 1201 - RNA, 19 nt, synthetic construct
  source 1..19: mol_type = other RNA
tctggatgcctgcttgcct

SEQ ID NO: 1202 - RNA, 19 nt, synthetic construct
  source 1..19: mol_type = other RNA
ggcaagcaggcatccagat

SEQ ID NO: 1203 - RNA, 19 nt, synthetic construct
  source 1..19: mol_type = other RNA
atctggatgcctgcttgcc

SEQ ID NO: 1204 - RNA, 19 nt, synthetic construct
  source 1..19: mol_type = other RNA
gcaagcaggcatccagatg

SEQ ID NO: 1205 - RNA, 19 nt, synthetic construct
  source 1..19: mol_type = other RNA
catctggatgcctgcttgc

SEQ ID NO: 1206 - RNA, 19 nt, synthetic construct
  source 1..19: mol_type = other RNA
caagcaggcatccagatgt

SEQ ID NO: 1207 - RNA, 19 nt, synthetic construct
  source 1..19: mol_type = other RNA
acatctggatgcctgcttg

SEQ ID NO: 1208 - RNA, 19 nt, synthetic construct
  source 1..19: mol_type = other RNA
aagcaggcatccagatgta

SEQ ID NO: 1209 - RNA, 19 nt, synthetic construct
  source 1..19: mol_type = other RNA
tacatctggatgcctgctt

SEQ ID NO: 1210 - RNA, 19 nt, synthetic construct
  source 1..19: mol_type = other RNA
agcaggcatccagatgtac

SEQ ID NO: 1211 - RNA, 19 nt, synthetic construct
  source 1..19: mol_type = other RNA
gtacatctggatgcctgct

SEQ ID NO: 1212 - RNA, 19 nt, synthetic construct
  source 1..19: mol_type = other RNA
gcaggcatccagatgtacc

SEQ ID NO: 1213 - RNA, 19 nt, synthetic construct
  source 1..19: mol_type = other RNA
ggtacatctggatgcctgc

SEQ ID NO: 1214 - RNA, 19 nt, synthetic construct
  source 1..19: mol_type = other RNA
caggcatccagatgtacct

SEQ ID NO: 1215 - RNA, 19 nt, synthetic construct
  source 1..19: mol_type = other RNA
aggtacatctggatgcctg

SEQ ID NO: 1216 - RNA, 19 nt, synthetic construct
  source 1..19: mol_type = other RNA
agcactatggctacctgcc

SEQ ID NO: 1217 - RNA, 19 nt, synthetic construct
  source 1..19: mol_type = other RNA
ggcaggtagccatagtgct

SEQ ID NO: 1218 - RNA, 19 nt, synthetic construct
  source 1..19: mol_type = other RNA
gcactatggctacctgccc

SEQ ID NO: 1219 - RNA, 19 nt, synthetic construct
  source 1..19: mol_type = other RNA
gggcaggtagccatagtgc

SEQ ID NO: 1220 - RNA, 19 nt, synthetic construct
  source 1..19: mol_type = other RNA
cactatggctacctgccca

SEQ ID NO: 1221 - RNA, 19 nt, synthetic construct
  source 1..19: mol_type = other RNA
tgggcaggtagccatagtg

SEQ ID NO: 1222 - RNA, 19 nt, synthetic construct
  source 1..19: mol_type = other RNA
catcagacactgcaggaag

SEQ ID NO: 1223 - RNA, 19 nt, synthetic construct
  source 1..19: mol_type = other RNA
cttcctgcagtgtctgatg

SEQ ID NO: 1224 - RNA, 19 nt, synthetic construct
  source 1..19: mol_type = other RNA
atcagacactgcaggaaga

SEQ ID NO: 1225 - RNA, 19 nt, synthetic construct
  source 1..19: mol_type = other RNA
tcttcctgcagtgtctgat

SEQ ID NO: 1226 - RNA, 19 nt, synthetic construct
  source 1..19: mol_type = other RNA
tcagacactgcaggaagac

SEQ ID NO: 1227 - RNA, 19 nt, synthetic construct
  source 1..19: mol_type = other RNA
gtcttcctgcagtgtctga

SEQ ID NO: 1228 - RNA, 19 nt, synthetic construct
  source 1..19: mol_type = other RNA
actgcaggaagacatcgag

SEQ ID NO: 1229 - RNA, 19 nt, synthetic construct
  source 1..19: mol_type = other RNA
ctcgatgtcttcctgcagt

SEQ ID NO: 1230 - RNA, 19 nt, synthetic construct
  source 1..19: mol_type = other RNA
cctcatccatgtgcagatt

SEQ ID NO: 1231 - RNA, 19 nt, synthetic construct
  source 1..19: mol_type = other RNA
aatctgcacatggatgagg

SEQ ID NO: 1232 - RNA, 19 nt, synthetic construct
  source 1..19: mol_type = other RNA
tcatccatgtgcagattga

SEQ ID NO: 1233 - RNA, 19 nt, synthetic construct
  source 1..19: mol_type = other RNA
tcaatctgcacatggatga

SEQ ID NO: 1234 - RNA, 19 nt, synthetic construct
  source 1..19: mol_type = other RNA
atccatgtgcagattgaag

SEQ ID NO: 1235 - RNA, 19 nt, synthetic construct
  source 1..19: mol_type = other RNA
cttcaatctgcacatggat

SEQ ID NO: 1236 - RNA, 19 nt, synthetic construct
  source 1..19: mol_type = other RNA
tccatgtgcagattgaagc

SEQ ID NO: 1237 - RNA, 19 nt, synthetic construct
  source 1..19: mol_type = other RNA
gcttcaatctgcacatgga

SEQ ID NO: 1238 - RNA, 19 nt, synthetic construct
  source 1..19: mol_type = other RNA
ccatgtgcagattgaagca

SEQ ID NO: 1239 - RNA, 19 nt, synthetic construct
  source 1..19: mol_type = other RNA
tgcttcaatctgcacatgg

SEQ ID NO: 1240 - RNA, 19 nt, synthetic construct
  source 1..19: mol_type = other RNA
catgtgcagattgaagcaa

SEQ ID NO: 1241 - RNA, 19 nt, synthetic construct
  source 1..19: mol_type = other RNA
ttgcttcaatctgcacatg

SEQ ID NO: 1242 - RNA, 19 nt, synthetic construct
  source 1..19: mol_type = other RNA
ttgaagcaatgattgaccg

SEQ ID NO: 1243 - RNA, 19 nt, synthetic construct
  source 1..19: mol_type = other RNA
cggtcaatcattgcttcaa

SEQ ID NO: 1244 - RNA, 19 nt, synthetic construct
  source 1..19: mol_type = other RNA
tgaagcaatgattgaccgt

SEQ ID NO: 1245 - RNA, 19 nt, synthetic construct
  source 1..19: mol_type = other RNA
acggtcaatcattgcttca

SEQ ID NO: 1246 - RNA, 19 nt, synthetic construct
  source 1..19: mol_type = other RNA
gaagcaatgattgaccgtc

SEQ ID NO: 1247 - RNA, 19 nt, synthetic construct
  source 1..19: mol_type = other RNA
gacggtcaatcattgcttc

SEQ ID NO: 1248 - RNA, 19 nt, synthetic construct
  source 1..19: mol_type = other RNA
ttgaccgtcctccaatgga

SEQ ID NO: 1249 - RNA, 19 nt, synthetic construct
  source 1..19: mol_type = other RNA
tccattggaggacggtcaa

SEQ ID NO: 1250 - RNA, 19 nt, synthetic construct
  source 1..19: mol_type = other RNA
tgaccgtcctccaatggaa

SEQ ID NO: 1251 - RNA, 19 nt, synthetic construct
  source 1..19: mol_type = other RNA
ttccattggaggacggtca

SEQ ID NO: 1252 - RNA, 19 nt, synthetic construct
  source 1..19: mol_type = other RNA
aaccctcccagtatgtctc

SEQ ID NO: 1253 - RNA, 19 nt, synthetic construct
  source 1..19: mol_type = other RNA
gagacatactgggagggtt

SEQ ID NO: 1254 - RNA, 19 nt, synthetic construct
  source 1..19: mol_type = other RNA
ccctcccagtatgtctcag

SEQ ID NO: 1255 - RNA, 19 nt, synthetic construct
  source 1..19: mol_type = other RNA
ctgagacatactgggaggg

SEQ ID NO: 1256 - RNA, 19 nt, synthetic construct
  source 1..19: mol_type = other RNA
cctcccagtatgtctcagt

SEQ ID NO: 1257 - RNA, 19 nt, synthetic construct
  source 1..19: mol_type = other RNA
actgagacatactgggagg

SEQ ID NO: 1258 - RNA, 19 nt, synthetic construct
  source 1..19: mol_type = other RNA
ctcccagtatgtctcagtt

SEQ ID NO: 1259 - RNA, 19 nt, synthetic construct
  source 1..19: mol_type = other RNA
aactgagacatactgggag

SEQ ID NO: 1260 - RNA, 19 nt, synthetic construct
  source 1..19: mol_type = other RNA
tcccagtatgtctcagttg

SEQ ID NO: 1261 - RNA, 19 nt, synthetic construct
  source 1..19: mol_type = other RNA
caactgagacatactggga

SEQ ID NO: 1262 - RNA, 19 nt, synthetic construct
  source 1..19: mol_type = other RNA
ccagtatgtctcagttgtc

SEQ ID NO: 1263 - RNA, 19 nt, synthetic construct
  source 1..19: mol_type = other RNA
gacaactgagacatactgg

SEQ ID NO: 1264 - RNA, 19 nt, synthetic construct
  source 1..19: mol_type = other RNA
cagtatgtctcagttgtcc

SEQ ID NO: 1265 - RNA, 19 nt, synthetic construct
  source 1..19: mol_type = other RNA
ggacaactgagacatactg

SEQ ID NO: 1266 - RNA, 19 nt, synthetic construct
  source 1..19: mol_type = other RNA
agtatgtctcagttgtccc

SEQ ID NO: 1267 - RNA, 19 nt, synthetic construct
  source 1..19: mol_type = other RNA
gggacaactgagacatact

SEQ ID NO: 1268 - RNA, 19 nt, synthetic construct
  source 1..19: mol_type = other RNA
gtatgtctcagttgtccct

SEQ ID NO: 1269 - RNA, 19 nt, synthetic construct
  source 1..19: mol_type = other RNA
agggacaactgagacatac

SEQ ID NO: 1270 - RNA, 19 nt, synthetic construct
  source 1..19: mol_type = other RNA
tatgtctcagttgtcccta

SEQ ID NO: 1271 - RNA, 19 nt, synthetic construct
  source 1..19: mol_type = other RNA
tagggacaactgagacata

SEQ ID NO: 1272 - RNA, 19 nt, synthetic construct
  source 1..19: mol_type = other RNA
atgtctcagttgtccctaa

SEQ ID NO: 1273 - RNA, 19 nt, synthetic construct
  source 1..19: mol_type = other RNA
ttagggacaactgagacat

SEQ ID NO: 1274 - RNA, 19 nt, synthetic construct
  source 1..19: mol_type = other RNA
tgtctcagttgtccctaaa

SEQ ID NO: 1275 - RNA, 19 nt, synthetic construct
  source 1..19: mol_type = other RNA
tttagggacaactgagaca

SEQ ID NO: 1276 - RNA, 19 nt, synthetic construct
  source 1..19: mol_type = other RNA
gtctcagttgtccctaaat

SEQ ID NO: 1277 - RNA, 19 nt, synthetic construct
  source 1..19: mol_type = other RNA
atttagggacaactgagac

SEQ ID NO: 1278 - RNA, 19 nt, synthetic construct
  source 1..19: mol_type = other RNA
tctcagttgtccctaaata

SEQ ID NO: 1279 - RNA, 19 nt, synthetic construct
  source 1..19: mol_type = other RNA
tatttagggacaactgaga

SEQ ID NO: 1280 - RNA, 19 nt, synthetic construct
  source 1..19: mol_type = other RNA
ctcagttgtccctaaatat

SEQ ID NO: 1281 - RNA, 19 nt, synthetic construct
  source 1..19: mol_type = other RNA
atatttagggacaactgag

SEQ ID NO: 1282 - RNA, 19 nt, synthetic construct
  source 1..19: mol_type = other RNA
tcagttgtccctaaatatc

SEQ ID NO: 1283 - RNA, 19 nt, synthetic construct
  source 1..19: mol_type = other RNA
gatatttagggacaactga

SEQ ID NO: 1284 - RNA, 19 nt, synthetic construct
  source 1..19: mol_type = other RNA
cagttgtccctaaatatcc

SEQ ID NO: 1285 - RNA, 19 nt, synthetic construct
  source 1..19: mol_type = other RNA
ggatatttagggacaactg

SEQ ID NO: 1286 - RNA, 19 nt, synthetic construct
  source 1..19: mol_type = other RNA
tgtccctaaatatccagac

SEQ ID NO: 1287 - RNA, 19 nt, synthetic construct
  source 1..19: mol_type = other RNA
gtctggatatttagggaca

SEQ ID NO: 1288 - RNA, 19 nt, synthetic construct
  source 1..19: mol_type = other RNA
caagatgggatttgatgag

SEQ ID NO: 1289 - RNA, 19 nt, synthetic construct
  source 1..19: mol_type = other RNA
ctcatcaaatcccatcttg

SEQ ID NO: 1290 - RNA, 19 nt, synthetic construct
  source 1..19: mol_type = other RNA
agattgaggtcaagattgt

SEQ ID NO: 1291 - RNA, 19 nt, synthetic construct
  source 1..19: mol_type = other RNA
acaatcttgacctcaatct

SEQ ID NO: 1292 - RNA, 19 nt, synthetic construct
  source 1..19: mol_type = other RNA
gattgaggtcaagattgtc

SEQ ID NO: 1293 - RNA, 19 nt, synthetic construct
  source 1..19: mol_type = other RNA
gacaatcttgacctcaatc

SEQ ID NO: 1294 - RNA, 19 nt, synthetic construct
  source 1..19: mol_type = other RNA
attgaggtcaagattgtcg

SEQ ID NO: 1295 - RNA, 19 nt, synthetic construct
  source 1..19: mol_type = other RNA
cgacaatcttgacctcaat

SEQ ID NO: 1296 - RNA, 19 nt, synthetic construct
  source 1..19: mol_type = other RNA
ttgaggtcaagattgtcga

SEQ ID NO: 1297 - RNA, 19 nt, synthetic construct
  source 1..19: mol_type = other RNA
tcgacaatcttgacctcaa

SEQ ID NO: 1298 - RNA, 19 nt, synthetic construct
  source 1..19: mol_type = other RNA
tgaggtcaagattgtcgag

SEQ ID NO: 1299 - RNA, 19 nt, synthetic construct
  source 1..19: mol_type = other RNA
ctcgacaatcttgacctca

SEQ ID NO: 1300 - RNA, 19 nt, synthetic construct
  source 1..19: mol_type = other RNA
gaggtcaagattgtcgagg

SEQ ID NO: 1301 - RNA, 19 nt, synthetic construct
  source 1..19: mol_type = other RNA
cctcgacaatcttgacctc

SEQ ID NO: 1302 - RNA, 19 nt, synthetic construct
  source 1..19: mol_type = other RNA
aggtcaagattgtcgaggc

SEQ ID NO: 1303 - RNA, 19 nt, synthetic construct
  source 1..19: mol_type = other RNA
gcctcgacaatcttgacct

SEQ ID NO: 1304 - RNA, 19 nt, synthetic construct
  source 1..19: mol_type = other RNA
ggtcaagattgtcgaggct

SEQ ID NO: 1305 - RNA, 19 nt, synthetic construct
  source 1..19: mol_type = other RNA
agcctcgacaatcttgacc

SEQ ID NO: 1306 - RNA, 19 nt, synthetic construct
  source 1..19: mol_type = other RNA
gtcaagattgtcgaggctg

SEQ ID NO: 1307 - RNA, 19 nt, synthetic construct
  source 1..19: mol_type = other RNA
cagcctcgacaatcttgac

SEQ ID NO: 1308 - RNA, 19 nt, synthetic construct
  source 1..19: mol_type = other RNA
tcaagattgtcgaggctgt

SEQ ID NO: 1309 - RNA, 19 nt, synthetic construct
  source 1..19: mol_type = other RNA
acagcctcgacaatcttga

SEQ ID NO: 1310 - RNA, 19 nt, synthetic construct
  source 1..19: mol_type = other RNA
caagattgtcgaggctgtg

SEQ ID NO: 1311 - RNA, 19 nt, synthetic construct
  source 1..19: mol_type = other RNA
cacagcctcgacaatcttg

SEQ ID NO: 1312 - RNA, 19 nt, synthetic construct
  source 1..19: mol_type = other RNA
aagattgtcgaggctgtgg

SEQ ID NO: 1313 - RNA, 19 nt, synthetic construct
  source 1..19: mol_type = other RNA
ccacagcctcgacaatctt

SEQ ID NO: 1314 - RNA, 19 nt, synthetic construct
  source 1..19: mol_type = other RNA
agattgtcgaggctgtgga

SEQ ID NO: 1315 - RNA, 19 nt, synthetic construct
  source 1..19: mol_type = other RNA
tccacagcctcgacaatct

SEQ ID NO: 1316 - RNA, 19 nt, synthetic construct
  source 1..19: mol_type = other RNA
gattgtcgaggctgtggat

SEQ ID NO: 1317 - RNA, 19 nt, synthetic construct
  source 1..19: mol_type = other RNA
atccacagcctcgacaatc

SEQ ID NO: 1318 - RNA, 19 nt, synthetic construct
  source 1..19: mol_type = other RNA
attgtcgaggctgtggatg

SEQ ID NO: 1319 - RNA, 19 nt, synthetic construct
  source 1..19: mol_type = other RNA
catccacagcctcgacaat

SEQ ID NO: 1320 - RNA, 19 nt, synthetic construct
  source 1..19: mol_type = other RNA
ttgtcgaggctgtggatgg

SEQ ID NO: 1321 - RNA, 19 nt, synthetic construct
  source 1..19: mol_type = other RNA
ccatccacagcctcgacaa

SEQ ID NO: 1322 - RNA, 19 nt, synthetic construct
  source 1..19: mol_type = other RNA
tgtcgaggctgtggatgga

SEQ ID NO: 1323 - RNA, 19 nt, synthetic construct
  source 1..19: mol_type = other RNA
tccatccacagcctcgaca

SEQ ID NO: 1324 - RNA, 19 nt, synthetic construct
  source 1..19: mol_type = other RNA
gctgaaggcactgaatatt

SEQ ID NO: 1325 - RNA, 19 nt, synthetic construct
  source 1..19: mol_type = other RNA
aatattcagtgccttcagc

SEQ ID NO: 1326 - RNA, 19 nt, synthetic construct
  source 1..19: mol_type = other RNA
aaatgctgcctggctatcg

SEQ ID NO: 1327 - RNA, 19 nt, synthetic construct
  source 1..19: mol_type = other RNA
cgatagccaggcagcattt

SEQ ID NO: 1328 - RNA, 19 nt, synthetic construct
  source 1..19: mol_type = other RNA
aatgctgcctggctatcga

SEQ ID NO: 1329 - RNA, 19 nt, synthetic construct
  source 1..19: mol_type = other RNA
tcgatagccaggcagcatt

SEQ ID NO: 1330 - RNA, 19 nt, synthetic construct
  source 1..19: mol_type = other RNA
atgctgcctggctatcgag

SEQ ID NO: 1331 - RNA, 19 nt, synthetic construct
  source 1..19: mol_type = other RNA
ctcgatagccaggcagcat

SEQ ID NO: 1332 - RNA, 19 nt, synthetic construct
  source 1..19: mol_type = other RNA
gatccctattcctccaggc

SEQ ID NO: 1333 - RNA, 19 nt, synthetic construct
  source 1..19: mol_type = other RNA
gcctggaggaatagggatc

SEQ ID NO: 1334 - RNA, 19 nt, synthetic construct
  source 1..19: mol_type = other RNA
atccctattcctccaggcc

SEQ ID NO: 1335 - RNA, 19 nt, synthetic construct
  source 1..19: mol_type = other RNA
ggcctggaggaatagggat

SEQ ID NO: 1336 - RNA, 19 nt, synthetic construct
  source 1..19: mol_type = other RNA
ccctattcctccaggcctc

SEQ ID NO: 1337 - RNA, 19 nt, synthetic construct
  source 1..19: mol_type = other RNA
gaggcctggaggaataggg

SEQ ID NO: 1338 - RNA, 19 nt, synthetic construct
  source 1..19: mol_type = other RNA
cctattcctccaggcctct

SEQ ID NO: 1339 - RNA, 19 nt, synthetic construct
  source 1..19: mol_type = other RNA
agaggcctggaggaatagg

SEQ ID NO: 1340 - RNA, 19 nt, synthetic construct
  source 1..19: mol_type = other RNA
ctttctcagccactactca

SEQ ID NO: 1341 - RNA, 19 nt, synthetic construct
  source 1..19: mol_type = other RNA
tgagtagtggctgagaaag

SEQ ID NO: 1342 - RNA, 19 nt, synthetic construct
  source 1..19: mol_type = other RNA
aaagaggtaattgatcgag

SEQ ID NO: 1343 - RNA, 19 nt, synthetic construct
  source 1..19: mol_type = other RNA
ctcgatcaattacctcttt

SEQ ID NO: 1344 - RNA, 19 nt, synthetic construct
  source 1..19: mol_type = other RNA
agaagactcttgtaattga

SEQ ID NO: 1345 - RNA, 19 nt, synthetic construct
  source 1..19: mol_type = other RNA
tcaattacaagagtcttct

SEQ ID NO: 1346 - RNA, 19 nt, synthetic construct
  source 1..19: mol_type = other RNA
gaagactcttgtaattgaa

SEQ ID NO: 1347 - RNA, 19 nt, synthetic construct
  source 1..19: mol_type = other RNA
ttcaattacaagagtcttc

SEQ ID NO: 1348 - RNA, 19 nt, synthetic construct
  source 1..19: mol_type = other RNA
aagactcttgtaattgaag

SEQ ID NO: 1349 - RNA, 19 nt, synthetic construct
  source 1..19: mol_type = other RNA
cttcaattacaagagtctt

SEQ ID NO: 1350 - RNA, 19 nt, synthetic construct
  source 1..19: mol_type = other RNA
cttgtaattgaagacgatg

SEQ ID NO: 1351 - RNA, 19 nt, synthetic construct
  source 1..19: mol_type = other RNA
catcgtcttcaattacaag

SEQ ID NO: 1352 - RNA, 19 nt, synthetic construct
  source 1..19: mol_type = other RNA
ttgtaattgaagacgatgt

SEQ ID NO: 1353 - RNA, 19 nt, synthetic construct
  source 1..19: mol_type = other RNA
acatcgtcttcaattacaa

SEQ ID NO: 1354 - RNA, 19 nt, synthetic construct
  source 1..19: mol_type = other RNA
tgtaattgaagacgatgtg

SEQ ID NO: 1355 - RNA, 19 nt, synthetic construct
  source 1..19: mol_type = other RNA
cacatcgtcttcaattaca

SEQ ID NO: 1356 - RNA, 19 nt, synthetic construct
  source 1..19: mol_type = other RNA
gtaattgaagacgatgtgc

SEQ ID NO: 1357 - RNA, 19 nt, synthetic construct
  source 1..19: mol_type = other RNA
gcacatcgtcttcaattac

SEQ ID NO: 1358 - RNA, 19 nt, synthetic construct
  source 1..19: mol_type = other RNA
taattgaagacgatgtgcg

SEQ ID NO: 1359 - RNA, 19 nt, synthetic construct
  source 1..19: mol_type = other RNA
cgcacatcgtcttcaatta

SEQ ID NO: 1360 - RNA, 19 nt, synthetic construct
  source 1..19: mol_type = other RNA
aattgaagacgatgtgcgt

SEQ ID NO: 1361 - RNA, 19 nt, synthetic construct
  source 1..19: mol_type = other RNA
acgcacatcgtcttcaatt

SEQ ID NO: 1362 - RNA, 19 nt, synthetic construct
  source 1..19: mol_type = other RNA
attgaagacgatgtgcgtt

SEQ ID NO: 1363 - RNA, 19 nt, synthetic construct
  source 1..19: mol_type = other RNA
aacgcacatcgtcttcaat

SEQ ID NO: 1364 - RNA, 19 nt, synthetic construct
  source 1..19: mol_type = other RNA
ttgaagacgatgtgcgttt

SEQ ID NO: 1365 - RNA, 19 nt, synthetic construct
  source 1..19: mol_type = other RNA
aaacgcacatcgtcttcaa

SEQ ID NO: 1366 - RNA, 19 nt, synthetic construct
  source 1..19: mol_type = other RNA
tgaagacgatgtgcgtttt

SEQ ID NO: 1367 - RNA, 19 nt, synthetic construct
  source 1..19: mol_type = other RNA
aaaacgcacatcgtcttca

SEQ ID NO: 1368 - RNA, 19 nt, synthetic construct
  source 1..19: mol_type = other RNA
gaagacgatgtgcgttttg

SEQ ID NO: 1369 - RNA, 19 nt, synthetic construct
  source 1..19: mol_type = other RNA
caaaacgcacatcgtcttc

SEQ ID NO: 1370 - RNA, 19 nt, synthetic construct
  source 1..19: mol_type = other RNA
aagacgatgtgcgttttga

SEQ ID NO: 1371 - RNA, 19 nt, synthetic construct
  source 1..19: mol_type = other RNA
tcaaaacgcacatcgtctt

SEQ ID NO: 1372 - RNA, 19 nt, synthetic construct
  source 1..19: mol_type = other RNA
cgatgtgcgttttgagcat

SEQ ID NO: 1373 - RNA, 19 nt, synthetic construct
  source 1..19: mol_type = other RNA
atgctcaaaacgcacatcg

SEQ ID NO: 1374 - RNA, 19 nt, synthetic construct
  source 1..19: mol_type = other RNA
atgtgcgttttgagcatca

SEQ ID NO: 1375 - RNA, 19 nt, synthetic construct
  source 1..19: mol_type = other RNA
tgatgctcaaaacgcacat

SEQ ID NO: 1376 - RNA, 19 nt, synthetic construct
  source 1..19: mol_type = other RNA
gcgttttgagcatcagttt

SEQ ID NO: 1377 - RNA, 19 nt, synthetic construct
  source 1..19: mol_type = other RNA
aaactgatgctcaaaacgc

SEQ ID NO: 1378 - RNA, 19 nt, synthetic construct
  source 1..19: mol_type = other RNA
ttttgagcatcagtttaag

SEQ ID NO: 1379 - RNA, 19 nt, synthetic construct
  source 1..19: mol_type = other RNA
cttaaactgatgctcaaaa

SEQ ID NO: 1380 - RNA, 19 nt, synthetic construct
  source 1..19: mol_type = other RNA
tttgagcatcagtttaaga

SEQ ID NO: 1381 - RNA, 19 nt, synthetic construct
  source 1..19: mol_type = other RNA
tcttaaactgatgctcaaa

SEQ ID NO: 1382 - RNA, 19 nt, synthetic construct
  source 1..19: mol_type = other RNA
ttgagcatcagtttaagaa

SEQ ID NO: 1383 - RNA, 19 nt, synthetic construct
  source 1..19: mol_type = other RNA
ttcttaaactgatgctcaa

SEQ ID NO: 1384 - RNA, 19 nt, synthetic construct
  source 1..19: mol_type = other RNA
tgagcatcagtttaagaag

SEQ ID NO: 1385 - RNA, 19 nt, synthetic construct
  source 1..19: mol_type = other RNA
cttcttaaactgatgctca

SEQ ID NO: 1386 - RNA, 19 nt, synthetic construct
  source 1..19: mol_type = other RNA
gagcatcagtttaagaaga

SEQ ID NO: 1387 - RNA, 19 nt, synthetic construct
  source 1..19: mol_type = other RNA
tcttcttaaactgatgctc

SEQ ID NO: 1388 - RNA, 19 nt, synthetic construct
  source 1..19: mol_type = other RNA
agcatcagtttaagaagaa

SEQ ID NO: 1389 - RNA, 19 nt, synthetic construct
  source 1..19: mol_type = other RNA
ttcttcttaaactgatgct

SEQ ID NO: 1390 - RNA, 19 nt, synthetic construct
  source 1..19: mol_type = other RNA
gcatcagtttaagaagaag

SEQ ID NO: 1391 - RNA, 19 nt, synthetic construct
  source 1..19: mol_type = other RNA
cttcttcttaaactgatgc

SEQ ID NO: 1392 - RNA, 19 nt, synthetic construct
  source 1..19: mol_type = other RNA
cagtttaagaagaagctga

SEQ ID NO: 1393 - RNA, 19 nt, synthetic construct
  source 1..19: mol_type = other RNA
tcagcttcttcttaaactg

SEQ ID NO: 1394 - RNA, 19 nt, synthetic construct
  source 1..19: mol_type = other RNA
ttaagaagaagctgatgaa

SEQ ID NO: 1395 - RNA, 19 nt, synthetic construct
  source 1..19: mol_type = other RNA
ttcatcagcttcttcttaa

SEQ ID NO: 1396 - RNA, 19 nt, synthetic construct
  source 1..19: mol_type = other RNA
taagaagaagctgatgaag

SEQ ID NO: 1397 - RNA, 19 nt, synthetic construct
  source 1..19: mol_type = other RNA
cttcatcagcttcttctta

SEQ ID NO: 1398 - RNA, 19 nt, synthetic construct
  source 1..19: mol_type = other RNA
gctgatgaagctgatggat

SEQ ID NO: 1399 - RNA, 19 nt, synthetic construct
  source 1..19: mol_type = other RNA
atccatcagcttcatcagc

SEQ ID NO: 1400 - RNA, 19 nt, synthetic construct
  source 1..19: mol_type = other RNA
ctgatgaagctgatggata

SEQ ID NO: 1401 - RNA, 19 nt, synthetic construct
  source 1..19: mol_type = other RNA
tatccatcagcttcatcag

SEQ ID NO: 1402 - RNA, 19 nt, synthetic construct
  source 1..19: mol_type = other RNA
tgatgaagctgatggataa

SEQ ID NO: 1403 - RNA, 19 nt, synthetic construct
  source 1..19: mol_type = other RNA
ttatccatcagcttcatca

SEQ ID NO: 1404 - RNA, 19 nt, synthetic construct
  source 1..19: mol_type = other RNA
gatgaagctgatggataac

SEQ ID NO: 1405 - RNA, 19 nt, synthetic construct
  source 1..19: mol_type = other RNA
gttatccatcagcttcatc

SEQ ID NO: 1406 - RNA, 19 nt, synthetic construct
  source 1..19: mol_type = other RNA
aggctcagctggactggga

SEQ ID NO: 1407 - RNA, 19 nt, synthetic construct
  source 1..19: mol_type = other RNA
tcccagtccagctgagcct

SEQ ID NO: 1408 - RNA, 19 nt, synthetic construct
  source 1..19: mol_type = other RNA
ggctcagctggactgggaa

SEQ ID NO: 1409 - RNA, 19 nt, synthetic construct
  source 1..19: mol_type = other RNA
ttcccagtccagctgagcc

SEQ ID NO: 1410 - RNA, 19 nt, synthetic construct
  source 1..19: mol_type = other RNA
actgatttatattggtagg

SEQ ID NO: 1411 - RNA, 19 nt, synthetic construct
  source 1..19: mol_type = other RNA
cctaccaatataaatcagt

SEQ ID NO: 1412 - RNA, 19 nt, synthetic construct
  source 1..19: mol_type = other RNA
tttatattggtaggaagag

SEQ ID NO: 1413 - RNA, 19 nt, synthetic construct
  source 1..19: mol_type = other RNA
ctcttcctaccaatataaa

SEQ ID NO: 1414 - RNA, 19 nt, synthetic construct
  source 1..19: mol_type = other RNA
ttatattggtaggaagagg

SEQ ID NO: 1415 - RNA, 19 nt, synthetic construct
  source 1..19: mol_type = other RNA
cctcttcctaccaatataa

SEQ ID NO: 1416 - RNA, 19 nt, synthetic construct
  source 1..19: mol_type = other RNA
tatattggtaggaagagga

SEQ ID NO: 1417 - RNA, 19 nt, synthetic construct
  source 1..19: mol_type = other RNA
tcctcttcctaccaatata

SEQ ID NO: 1418 - RNA, 19 nt, synthetic construct
  source 1..19: mol_type = other RNA
atattggtaggaagaggat

SEQ ID NO: 1419 - RNA, 19 nt, synthetic construct
  source 1..19: mol_type = other RNA
atcctcttcctaccaatat

SEQ ID NO: 1420 - RNA, 19 nt, synthetic construct
  source 1..19: mol_type = other RNA
tattggtaggaagaggatg

SEQ ID NO: 1421 - RNA, 19 nt, synthetic construct
  source 1..19: mol_type = other RNA
catcctcttcctaccaata

SEQ ID NO: 1422 - RNA, 19 nt, synthetic construct
  source 1..19: mol_type = other RNA
ggtaggaagaggatgcaag

SEQ ID NO: 1423 - RNA, 19 nt, synthetic construct
  source 1..19: mol_type = other RNA
cttgcatcctcttcctacc

SEQ ID NO: 1424 - RNA, 19 nt, synthetic construct
  source 1..19: mol_type = other RNA
gtaggaagaggatgcaagt

SEQ ID NO: 1425 - RNA, 19 nt, synthetic construct
  source 1..19: mol_type = other RNA
acttgcatcctcttcctac

SEQ ID NO: 1426 - RNA, 19 nt, synthetic construct
  source 1..19: mol_type = other RNA
gaagaggatgcaagtaaag

SEQ ID NO: 1427 - RNA, 19 nt, synthetic construct
  source 1..19: mol_type = other RNA
ctttacttgcatcctcttc

SEQ ID NO: 1428 - RNA, 19 nt, synthetic construct
  source 1..19: mol_type = other RNA
aagaggatgcaagtaaagg

SEQ ID NO: 1429 - RNA, 19 nt, synthetic construct
  source 1..19: mol_type = other RNA
cctttacttgcatcctctt

SEQ ID NO: 1430 - RNA, 19 nt, synthetic construct
  source 1..19: mol_type = other RNA
agaggatgcaagtaaagga

SEQ ID NO: 1431 - RNA, 19 nt, synthetic construct
  source 1..19: mol_type = other RNA
tcctttacttgcatcctct

SEQ ID NO: 1432 - RNA, 19 nt, synthetic construct
  source 1..19: mol_type = other RNA
gaggatgcaagtaaaggag

SEQ ID NO: 1433 - RNA, 19 nt, synthetic construct
  source 1..19: mol_type = other RNA
ctcctttacttgcatcctc

SEQ ID NO: 1434 - RNA, 19 nt, synthetic construct
  source 1..19: mol_type = other RNA
aggatgcaagtaaaggagc

SEQ ID NO: 1435 - RNA, 19 nt, synthetic construct
  source 1..19: mol_type = other RNA
gctcctttacttgcatcct

SEQ ID NO: 1436 - RNA, 19 nt, synthetic construct
  source 1..19: mol_type = other RNA
ggatgcaagtaaaggagcc

SEQ ID NO: 1437 - RNA, 19 nt, synthetic construct
  source 1..19: mol_type = other RNA
ggctcctttacttgcatcc

SEQ ID NO: 1438 - RNA, 19 nt, synthetic construct
  source 1..19: mol_type = other RNA
gatgcaagtaaaggagcca

SEQ ID NO: 1439 - RNA, 19 nt, synthetic construct
  source 1..19: mol_type = other RNA
tggctcctttacttgcatc

SEQ ID NO: 1440 - RNA, 19 nt, synthetic construct
  source 1..19: mol_type = other RNA
aaagcagtgcccaatgtgg

SEQ ID NO: 1441 - RNA, 19 nt, synthetic construct
  source 1..19: mol_type = other RNA
ccacattgggcactgcttt

SEQ ID NO: 1442 - RNA, 19 nt, synthetic construct
  source 1..19: mol_type = other RNA
aagcagtgcccaatgtggc

SEQ ID NO: 1443 - RNA, 19 nt, synthetic construct
  source 1..19: mol_type = other RNA
gccacattgggcactgctt

SEQ ID NO: 1444 - RNA, 19 nt, synthetic construct
  source 1..19: mol_type = other RNA
gaagccgactattcctact

SEQ ID NO: 1445 - RNA, 19 nt, synthetic construct
  source 1..19: mol_type = other RNA
agtaggaatagtcggcttc

SEQ ID NO: 1446 - RNA, 19 nt, synthetic construct
  source 1..19: mol_type = other RNA
actattcctactggaccct

SEQ ID NO: 1447 - RNA, 19 nt, synthetic construct
  source 1..19: mol_type = other RNA
agggtccagtaggaatagt

SEQ ID NO: 1448 - RNA, 19 nt, synthetic construct
  source 1..19: mol_type = other RNA
ctattcctactggaccctg

SEQ ID NO: 1449 - RNA, 19 nt, synthetic construct
  source 1..19: mol_type = other RNA
cagggtccagtaggaatag

SEQ ID NO: 1450 - RNA, 19 nt, synthetic construct
  source 1..19: mol_type = other RNA
tcctactggaccctgggct

SEQ ID NO: 1451 - RNA, 19 nt, synthetic construct
  source 1..19: mol_type = other RNA
agcccagggtccagtagga

SEQ ID NO: 1452 - RNA, 19 nt, synthetic construct
  source 1..19: mol_type = other RNA
gtcatctctctggaaggag

SEQ ID NO: 1453 - RNA, 19 nt, synthetic construct
  source 1..19: mol_type = other RNA
ctccttccagagagatgac

SEQ ID NO: 1454 - RNA, 19 nt, synthetic construct
  source 1..19: mol_type = other RNA
tcatctctctggaaggagc

SEQ ID NO: 1455 - RNA, 19 nt, synthetic construct
  source 1..19: mol_type = other RNA
gctccttccagagagatga

SEQ ID NO: 1456 - RNA, 19 nt, synthetic construct
  source 1..19: mol_type = other RNA
catctctctggaaggagca

SEQ ID NO: 1457 - RNA, 19 nt, synthetic construct
  source 1..19: mol_type = other RNA
tgctccttccagagagatg

SEQ ID NO: 1458 - RNA, 19 nt, synthetic construct
  source 1..19: mol_type = other RNA
atctctctggaaggagcac

SEQ ID NO: 1459 - RNA, 19 nt, synthetic construct
  source 1..19: mol_type = other RNA
gtgctccttccagagagat

SEQ ID NO: 1460 - RNA, 19 nt, synthetic construct
  source 1..19: mol_type = other RNA
gaaggagcacagaagctgg

SEQ ID NO: 1461 - RNA, 19 nt, synthetic construct
  source 1..19: mol_type = other RNA
ccagcttctgtgctccttc

SEQ ID NO: 1462 - RNA, 19 nt, synthetic construct
  source 1..19: mol_type = other RNA
aggagcacagaagctggtt

SEQ ID NO: 1463 - RNA, 19 nt, synthetic construct
  source 1..19: mol_type = other RNA
aaccagcttctgtgctcct

SEQ ID NO: 1464 - RNA, 19 nt, synthetic construct
  source 1..19: mol_type = other RNA
ggagcacagaagctggttg

SEQ ID NO: 1465 - RNA, 19 nt, synthetic construct
  source 1..19: mol_type = other RNA
caaccagcttctgtgctcc

SEQ ID NO: 1466 - RNA, 19 nt, synthetic construct
  source 1..19: mol_type = other RNA
gagcacagaagctggttgg

SEQ ID NO: 1467 - RNA, 19 nt, synthetic construct
  source 1..19: mol_type = other RNA
ccaaccagcttctgtgctc

SEQ ID NO: 1468 - RNA, 19 nt, synthetic construct
  source 1..19: mol_type = other RNA
agcacagaagctggttgga

SEQ ID NO: 1469 - RNA, 19 nt, synthetic construct
  source 1..19: mol_type = other RNA
tccaaccagcttctgtgct

SEQ ID NO: 1470 - RNA, 19 nt, synthetic construct
  source 1..19: mol_type = other RNA
gcacagaagctggttggag

SEQ ID NO: 1471 - RNA, 19 nt, synthetic construct
  source 1..19: mol_type = other RNA
ctccaaccagcttctgtgc

SEQ ID NO: 1472 - RNA, 19 nt, synthetic construct
  source 1..19: mol_type = other RNA
cacagaagctggttggagc

SEQ ID NO: 1473 - RNA, 19 nt, synthetic construct
  source 1..19: mol_type = other RNA
gctccaaccagcttctgtg

SEQ ID NO: 1474 - RNA, 19 nt, synthetic construct
  source 1..19: mol_type = other RNA
cagaagctggttggagcca

SEQ ID NO: 1475 - RNA, 19 nt, synthetic construct
  source 1..19: mol_type = other RNA
tggctccaaccagcttctg

SEQ ID NO: 1476 - RNA, 19 nt, synthetic construct
  source 1..19: mol_type = other RNA
agaagctggttggagccaa

SEQ ID NO: 1477 - RNA, 19 nt, synthetic construct
  source 1..19: mol_type = other RNA
ttggctccaaccagcttct

SEQ ID NO: 1478 - RNA, 19 nt, synthetic construct
  source 1..19: mol_type = other RNA
aagctggttggagccaatc

SEQ ID NO: 1479 - RNA, 19 nt, synthetic construct
  source 1..19: mol_type = other RNA
gattggctccaaccagctt

SEQ ID NO: 1480 - RNA, 19 nt, synthetic construct
  source 1..19: mol_type = other RNA
agctggttggagccaatcc

SEQ ID NO: 1481 - RNA, 19 nt, synthetic construct
  source 1..19: mol_type = other RNA
ggattggctccaaccagct

SEQ ID NO: 1482 - RNA, 19 nt, synthetic construct
  source 1..19: mol_type = other RNA
ctggttggagccaatcctt

SEQ ID NO: 1483 - RNA, 19 nt, synthetic construct
  source 1..19: mol_type = other RNA
aaggattggctccaaccag

SEQ ID NO: 1484 - RNA, 19 nt, synthetic construct
  source 1..19: mol_type = other RNA
ggttggagccaatcctttt

SEQ ID NO: 1485 - RNA, 19 nt, synthetic construct
  source 1..19: mol_type = other RNA
aaaaggattggctccaacc

SEQ ID NO: 1486 - RNA, 19 nt, synthetic construct
  source 1..19: mol_type = other RNA
gttggagccaatccttttg

SEQ ID NO: 1487 - RNA, 19 nt, synthetic construct
  source 1..19: mol_type = other RNA
caaaaggattggctccaac

SEQ ID NO: 1488 - RNA, 19 nt, synthetic construct
  source 1..19: mol_type = other RNA
tccttttgggaagatgctg

SEQ ID NO: 1489 - RNA, 19 nt, synthetic construct
  source 1..19: mol_type = other RNA
cagcatcttcccaaaagga

SEQ ID NO: 1490 - RNA, 19 nt, synthetic construct
  source 1..19: mol_type = other RNA
tttgggaagatgctgccag

SEQ ID NO: 1491 - RNA, 19 nt, synthetic construct
  source 1..19: mol_type = other RNA
ctggcagcatcttcccaaa

SEQ ID NO: 1492 - RNA, 19 nt, synthetic construct
  source 1..19: mol_type = other RNA
ggaagatgctgccagtgga

SEQ ID NO: 1493 - RNA, 19 nt, synthetic construct
  source 1..19: mol_type = other RNA
tccactggcagcatcttcc

SEQ ID NO: 1494 - RNA, 19 nt, synthetic construct
  source 1..19: mol_type = other RNA
gaagatgctgccagtggat

SEQ ID NO: 1495 - RNA, 19 nt, synthetic construct
  source 1..19: mol_type = other RNA
atccactggcagcatcttc

SEQ ID NO: 1496 - RNA, 19 nt, synthetic construct
  source 1..19: mol_type = other RNA
aagatgctgccagtggatg

SEQ ID NO: 1497 - RNA, 19 nt, synthetic construct
  source 1..19: mol_type = other RNA
catccactggcagcatctt

SEQ ID NO: 1498 - RNA, 19 nt, synthetic construct
  source 1..19: mol_type = other RNA
agatgctgccagtggatga

SEQ ID NO: 1499 - RNA, 19 nt, synthetic construct
  source 1..19: mol_type = other RNA
tcatccactggcagcatct

SEQ ID NO: 1500 - RNA, 19 nt, synthetic construct
  source 1..19: mol_type = other RNA
gatgctgccagtggatgag

SEQ ID NO: 1501 - RNA, 19 nt, synthetic construct
  source 1..19: mol_type = other RNA
ctcatccactggcagcatc

SEQ ID NO: 1502 - RNA, 19 nt, synthetic construct
  source 1..19: mol_type = other RNA
atgctgccagtggatgagt

SEQ ID NO: 1503 - RNA, 19 nt, synthetic construct
  source 1..19: mol_type = other RNA
actcatccactggcagcat

SEQ ID NO: 1504 - RNA, 19 nt, synthetic construct
  source 1..19: mol_type = other RNA
tgctgccagtggatgagtt

SEQ ID NO: 1505 - RNA, 19 nt, synthetic construct
  source 1..19: mol_type = other RNA
aactcatccactggcagca

SEQ ID NO: 1506 - RNA, 19 nt, synthetic construct
  source 1..19: mol_type = other RNA
gctgccagtggatgagttt

SEQ ID NO: 1507 - RNA, 19 nt, synthetic construct
  source 1..19: mol_type = other RNA
aaactcatccactggcagc

SEQ ID NO: 1508 - RNA, 19 nt, synthetic construct
  source 1..19: mol_type = other RNA
ctgccagtggatgagtttc

SEQ ID NO: 1509 - RNA, 19 nt, synthetic construct
  source 1..19: mol_type = other RNA
gaaactcatccactggcag

SEQ ID NO: 1510 - RNA, 19 nt, synthetic construct
  source 1..19: mol_type = other RNA
tgccagtggatgagtttct

SEQ ID NO: 1511 - RNA, 19 nt, synthetic construct
  source 1..19: mol_type = other RNA
agaaactcatccactggca

SEQ ID NO: 1512 - RNA, 19 nt, synthetic construct
  source 1..19: mol_type = other RNA
gccagtggatgagtttctg

SEQ ID NO: 1513 - RNA, 19 nt, synthetic construct
  source 1..19: mol_type = other RNA
cagaaactcatccactggc

SEQ ID NO: 1514 - RNA, 19 nt, synthetic construct
  source 1..19: mol_type = other RNA
ccagtggatgagtttctgc

SEQ ID NO: 1515 - RNA, 19 nt, synthetic construct
  source 1..19: mol_type = other RNA
gcagaaactcatccactgg

SEQ ID NO: 1516 - RNA, 19 nt, synthetic construct
  source 1..19: mol_type = other RNA
cagtggatgagtttctgcc

SEQ ID NO: 1517 - RNA, 19 nt, synthetic construct
  source 1..19: mol_type = other RNA
ggcagaaactcatccactg

SEQ ID NO: 1518 - RNA, 19 nt, synthetic construct
  source 1..19: mol_type = other RNA
agtggatgagtttctgcca

SEQ ID NO: 1519 - RNA, 19 nt, synthetic construct
  source 1..19: mol_type = other RNA
tggcagaaactcatccact

SEQ ID NO: 1520 - RNA, 19 nt, synthetic construct
  source 1..19: mol_type = other RNA
gtggatgagtttctgccag

SEQ ID NO: 1521 - RNA, 19 nt, synthetic construct
  source 1..19: mol_type = other RNA
ctggcagaaactcatccac

SEQ ID NO: 1522 - RNA, 19 nt, synthetic construct
  source 1..19: mol_type = other RNA
tgagtttctgccagtcatg

SEQ ID NO: 1523 - RNA, 19 nt, synthetic construct
  source 1..19: mol_type = other RNA
catgactggcagaaactca

SEQ ID NO: 1524 - RNA, 19 nt, synthetic construct
  source 1..19: mol_type = other RNA
gagtttctgccagtcatgt

SEQ ID NO: 1525 - RNA, 19 nt, synthetic construct
  source 1..19: mol_type = other RNA
acatgactggcagaaactc

SEQ ID NO: 1526 - RNA, 19 nt, synthetic construct
  source 1..19: mol_type = other RNA
agtttctgccagtcatgta

SEQ ID NO: 1527 - RNA, 19 nt, synthetic construct
  source 1..19: mol_type = other RNA
tacatgactggcagaaact

SEQ ID NO: 1528 - RNA, 19 nt, synthetic construct
  source 1..19: mol_type = other RNA
gtttctgccagtcatgtac

SEQ ID NO: 1529 - RNA, 19 nt, synthetic construct
  source 1..19: mol_type = other RNA
gtacatgactggcagaaac

SEQ ID NO: 1530 - RNA, 19 nt, synthetic construct
  source 1..19: mol_type = other RNA
aaggagtattatgaatcca

SEQ ID NO: 1531 - RNA, 19 nt, synthetic construct
  source 1..19: mol_type = other RNA
tggattcataatactcctt

SEQ ID NO: 1532 - RNA, 19 nt, synthetic construct
  source 1..19: mol_type = other RNA
aggagtattatgaatccag

SEQ ID NO: 1533 - RNA, 19 nt, synthetic construct
  source 1..19: mol_type = other RNA
ctggattcataatactcct

SEQ ID NO: 1534 - RNA, 19 nt, synthetic construct
  source 1..19: mol_type = other RNA
ggagtattatgaatccagg

SEQ ID NO: 1535 - RNA, 19 nt, synthetic construct
  source 1..19: mol_type = other RNA
cctggattcataatactcc

SEQ ID NO: 1536 - RNA, 19 nt, synthetic construct
  source 1..19: mol_type = other RNA
gagtattatgaatccaggg

SEQ ID NO: 1537 - RNA, 19 nt, synthetic construct
  source 1..19: mol_type = other RNA
ccctggattcataatactc

SEQ ID NO: 1538 - RNA, 19 nt, synthetic construct
  source 1..19: mol_type = other RNA
agtattatgaatccaggga

SEQ ID NO: 1539 - RNA, 19 nt, synthetic construct
  source 1..19: mol_type = other RNA
tccctggattcataatact

SEQ ID NO: 1540 - RNA, 19 nt, synthetic construct
  source 1..19: mol_type = other RNA
gtattatgaatccagggac

SEQ ID NO: 1541 - RNA, 19 nt, synthetic construct
  source 1..19: mol_type = other RNA
gtccctggattcataatac

SEQ ID NO: 1542 - RNA, 19 nt, synthetic construct
  source 1..19: mol_type = other RNA
tattatgaatccagggacc

SEQ ID NO: 1543 - RNA, 19 nt, synthetic construct
  source 1..19: mol_type = other RNA
ggtccctggattcataata

SEQ ID NO: 1544 - RNA, 19 nt, synthetic construct
  source 1..19: mol_type = other RNA
attatgaatccagggacct

SEQ ID NO: 1545 - RNA, 19 nt, synthetic construct
  source 1..19: mol_type = other RNA
aggtccctggattcataat

SEQ ID NO: 1546 - RNA, 19 nt, synthetic construct
  source 1..19: mol_type = other RNA
ttatgaatccagggacctg

SEQ ID NO: 1547 - RNA, 19 nt, synthetic construct
  source 1..19: mol_type = other RNA
caggtccctggattcataa

SEQ ID NO: 1548 - RNA, 19 nt, synthetic construct
  source 1..19: mol_type = other RNA
tatgaatccagggacctga

SEQ ID NO: 1549 - RNA, 19 nt, synthetic construct
  source 1..19: mol_type = other RNA
tcaggtccctggattcata

SEQ ID NO: 1550 - RNA, 19 nt, synthetic construct
  source 1..19: mol_type = other RNA
atgaatccagggacctgaa

SEQ ID NO: 1551 - RNA, 19 nt, synthetic construct
  source 1..19: mol_type = other RNA
ttcaggtccctggattcat

SEQ ID NO: 1552 - RNA, 19 nt, synthetic construct
  source 1..19: mol_type = other RNA
cccttgctcatctacccta

SEQ ID NO: 1553 - RNA, 19 nt, synthetic construct
  source 1..19: mol_type = other RNA
tagggtagatgagcaaggg

SEQ ID NO: 1554 - RNA, 19 nt, synthetic construct
  source 1..19: mol_type = other RNA
ccttgctcatctaccctac

SEQ ID NO: 1555 - RNA, 19 nt, synthetic construct
  source 1..19: mol_type = other RNA
gtagggtagatgagcaagg

SEQ ID NO: 1556 - RNA, 19 nt, synthetic construct
  source 1..19: mol_type = other RNA
cttgctcatctaccctacg

SEQ ID NO: 1557 - RNA, 19 nt, synthetic construct
  source 1..19: mol_type = other RNA
cgtagggtagatgagcaag

SEQ ID NO: 1558 - RNA, 19 nt, synthetic construct
  source 1..19: mol_type = other RNA
ttgctcatctaccctacgc

SEQ ID NO: 1559 - RNA, 19 nt, synthetic construct
  source 1..19: mol_type = other RNA
gcgtagggtagatgagcaa

SEQ ID NO: 1560 - RNA, 19 nt, synthetic construct
  source 1..19: mol_type = other RNA
tgctcatctaccctacgca

SEQ ID NO: 1561 - RNA, 19 nt, synthetic construct
  source 1..19: mol_type = other RNA
tgcgtagggtagatgagca

SEQ ID NO: 1562 - RNA, 19 nt, synthetic construct
  source 1..19: mol_type = other RNA
gctcatctaccctacgcac

SEQ ID NO: 1563 - RNA, 19 nt, synthetic construct
  source 1..19: mol_type = other RNA
gtgcgtagggtagatgagc

SEQ ID NO: 1564 - RNA, 19 nt, synthetic construct
  source 1..19: mol_type = other RNA
ctcatctaccctacgcact

SEQ ID NO: 1565 - RNA, 19 nt, synthetic construct
  source 1..19: mol_type = other RNA
agtgcgtagggtagatgag

SEQ ID NO: 1566 - RNA, 19 nt, synthetic construct
  source 1..19: mol_type = other RNA
tcatctaccctacgcacta

SEQ ID NO: 1567 - RNA, 19 nt, synthetic construct
  source 1..19: mol_type = other RNA
tagtgcgtagggtagatga

SEQ ID NO: 1568 - RNA, 19 nt, synthetic construct
  source 1..19: mol_type = other RNA
gtacctgagtgacacggag

SEQ ID NO: 1569 - RNA, 19 nt, synthetic construct
  source 1..19: mol_type = other RNA
ctccgtgtcactcaggtac

SEQ ID NO: 1570 - RNA, 19 nt, synthetic construct
  source 1..19: mol_type = other RNA
gacctccaccatctgggac

SEQ ID NO: 1571 - RNA, 19 nt, synthetic construct
  source 1..19: mol_type = other RNA
gtcccagatggtggaggtc

SEQ ID NO: 1572 - RNA, 19 nt, synthetic construct
  source 1..19: mol_type = other RNA
acctccaccatctgggaca

SEQ ID NO: 1573 - RNA, 19 nt, synthetic construct
  source 1..19: mol_type = other RNA
tgtcccagatggtggaggt

SEQ ID NO: 1574 - RNA, 19 nt, synthetic construct
  source 1..19: mol_type = other RNA
agtggccaccgactgggat

SEQ ID NO: 1575 - RNA, 19 nt, synthetic construct
  source 1..19: mol_type = other RNA
atcccagtcggtggccact

SEQ ID NO: 1576 - RNA, 19 nt, synthetic construct
  source 1..19: mol_type = other RNA
gtggccaccgactgggata

SEQ ID NO: 1577 - RNA, 19 nt, synthetic construct
  source 1..19: mol_type = other RNA
tatcccagtcggtggccac

SEQ ID NO: 1578 - RNA, 19 nt, synthetic construct
  source 1..19: mol_type = other RNA
tggccaccgactgggatag

SEQ ID NO: 1579 - RNA, 19 nt, synthetic construct
  source 1..19: mol_type = other RNA
ctatcccagtcggtggcca

SEQ ID NO: 1580 - RNA, 19 nt, synthetic construct
  source 1..19: mol_type = other RNA
accgactgggataggacac

SEQ ID NO: 1581 - RNA, 19 nt, synthetic construct
  source 1..19: mol_type = other RNA
gtgtcctatcccagtcggt

SEQ ID NO: 1582 - RNA, 19 nt, synthetic construct
  source 1..19: mol_type = other RNA
cacatgcctggaagtcccg

SEQ ID NO: 1583 - RNA, 19 nt, synthetic construct
  source 1..19: mol_type = other RNA
cgggacttccaggcatgtg

SEQ ID NO: 1584 - RNA, 19 nt, synthetic construct
  source 1..19: mol_type = other RNA
acatgcctggaagtcccgg

SEQ ID NO: 1585 - RNA, 19 nt, synthetic construct
  source 1..19: mol_type = other RNA
ccgggacttccaggcatgt

SEQ ID NO: 1586 - RNA, 19 nt, synthetic construct
  source 1..19: mol_type = other RNA
catgcctggaagtcccgga

SEQ ID NO: 1587 - RNA, 19 nt, synthetic construct
  source 1..19: mol_type = other RNA
tccgggacttccaggcatg

SEQ ID NO: 1588 - RNA, 19 nt, synthetic construct
  source 1..19: mol_type = other RNA
atgcctggaagtcccggaa

SEQ ID NO: 1589 - RNA, 19 nt, synthetic construct
  source 1..19: mol_type = other RNA
ttccgggacttccaggcat

SEQ ID NO: 1590 - RNA, 19 nt, synthetic construct
  source 1..19: mol_type = other RNA
tgcctggaagtcccggaag

SEQ ID NO: 1591 - RNA, 19 nt, synthetic construct
  source 1..19: mol_type = other RNA
cttccgggacttccaggca

SEQ ID NO: 1592 - RNA, 19 nt, synthetic construct
  source 1..19: mol_type = other RNA
cctggaagtcccggaagca

SEQ ID NO: 1593 - RNA, 19 nt, synthetic construct
  source 1..19: mol_type = other RNA
tgcttccgggacttccagg

SEQ ID NO: 1594 - RNA, 19 nt, synthetic construct
  source 1..19: mol_type = other RNA
tggaagtcccggaagcaaa

SEQ ID NO: 1595 - RNA, 19 nt, synthetic construct
  source 1..19: mol_type = other RNA
tttgcttccgggacttcca

SEQ ID NO: 1596 - RNA, 19 nt, synthetic construct
  source 1..19: mol_type = other RNA
ggaagtcccggaagcaaag

SEQ ID NO: 1597 - RNA, 19 nt, synthetic construct
  source 1..19: mol_type = other RNA
ctttgcttccgggacttcc

SEQ ID NO: 1598 - RNA, 19 nt, synthetic construct
  source 1..19: mol_type = other RNA
gaagtcccggaagcaaagc

SEQ ID NO: 1599 - RNA, 19 nt, synthetic construct
  source 1..19: mol_type = other RNA
gctttgcttccgggacttc

SEQ ID NO: 1600 - RNA, 19 nt, synthetic construct
  source 1..19: mol_type = other RNA
aagtcccggaagcaaagcc

SEQ ID NO: 1601 - RNA, 19 nt, synthetic construct
  source 1..19: mol_type = other RNA
ggctttgcttccgggactt

SEQ ID NO: 1602 - RNA, 19 nt, synthetic construct
  source 1..19: mol_type = other RNA
agtcccggaagcaaagccg

SEQ ID NO: 1603 - RNA, 19 nt, synthetic construct
  source 1..19: mol_type = other RNA
cggctttgcttccgggact

SEQ ID NO: 1604 - RNA, 19 nt, synthetic construct
  source 1..19: mol_type = other RNA
tcccggaagcaaagccgca

SEQ ID NO: 1605 - RNA, 19 nt, synthetic construct
  source 1..19: mol_type = other RNA
tgcggctttgcttccggga

SEQ ID NO: 1606 - RNA, 19 nt, synthetic construct
  source 1..19: mol_type = other RNA
cccggaagcaaagccgcat

SEQ ID NO: 1607 - RNA, 19 nt, synthetic construct
  source 1..19: mol_type = other RNA
atgcggctttgcttccggg

SEQ ID NO: 1608 - RNA, 19 nt, synthetic construct
  source 1..19: mol_type = other RNA
ccggaagcaaagccgcatc

SEQ ID NO: 1609 - RNA, 19 nt, synthetic construct
  source 1..19: mol_type = other RNA
gatgcggctttgcttccgg

SEQ ID NO: 1610 - RNA, 19 nt, synthetic construct
  source 1..19: mol_type = other RNA
cggaagcaaagccgcatct

SEQ ID NO: 1611 - RNA, 19 nt, synthetic construct
  source 1..19: mol_type = other RNA
agatgcggctttgcttccg

SEQ ID NO: 1612 - RNA, 19 nt, synthetic construct
  source 1..19: mol_type = other RNA
ggaagcaaagccgcatcta

SEQ ID NO: 1613 - RNA, 19 nt, synthetic construct
  source 1..19: mol_type = other RNA
tagatgcggctttgcttcc

SEQ ID NO: 1614 - RNA, 19 nt, synthetic construct
  source 1..19: mol_type = other RNA
caaagccgcatctacagca

SEQ ID NO: 1615 - RNA, 19 nt, synthetic construct
  source 1..19: mol_type = other RNA
tgctgtagatgcggctttg

SEQ ID NO: 1616 - RNA, 19 nt, synthetic construct
  source 1..19: mol_type = other RNA
aaagccgcatctacagcaa

SEQ ID NO: 1617 - RNA, 19 nt, synthetic construct
  source 1..19: mol_type = other RNA
ttgctgtagatgcggcttt

SEQ ID NO: 1618 - RNA, 19 nt, synthetic construct
  source 1..19: mol_type = other RNA
aagccgcatctacagcaat

SEQ ID NO: 1619 - RNA, 19 nt, synthetic construct
  source 1..19: mol_type = other RNA
attgctgtagatgcggctt

SEQ ID NO: 1620 - RNA, 19 nt, synthetic construct
  source 1..19: mol_type = other RNA
agccgcatctacagcaatg

SEQ ID NO: 1621 - RNA, 19 nt, synthetic construct
  source 1..19: mol_type = other RNA
cattgctgtagatgcggct

SEQ ID NO: 1622 - RNA, 19 nt, synthetic construct
  source 1..19: mol_type = other RNA
tctacagcaatgccaagaa

SEQ ID NO: 1623 - RNA, 19 nt, synthetic construct
  source 1..19: mol_type = other RNA
ttcttggcattgctgtaga

SEQ ID NO: 1624 - RNA, 19 nt, synthetic construct
  source 1..19: mol_type = other RNA
gccaacctccctggacact

SEQ ID NO: 1625 - RNA, 19 nt, synthetic construct
  source 1..19: mol_type = other RNA
agtgtccagggaggttggc

SEQ ID NO: 1626 - RNA, 19 nt, synthetic construct
  source 1..19: mol_type = other RNA
ctccctggacactgtgcct

SEQ ID NO: 1627 - RNA, 19 nt, synthetic construct
  source 1..19: mol_type = other RNA
aggcacagtgtccagggag

SEQ ID NO: 1628 - RNA, 19 nt, synthetic construct
  source 1..19: mol_type = other RNA
tggacactgtgccttcaag

SEQ ID NO: 1629 - RNA, 19 nt, synthetic construct
  source 1..19: mol_type = other RNA
cttgaaggcacagtgtcca

SEQ ID NO: 1630 - RNA, 19 nt, synthetic construct
  source 1..19: mol_type = other RNA
ggacactgtgccttcaagg

SEQ ID NO: 1631 - RNA, 19 nt, synthetic construct
  source 1..19: mol_type = other RNA
ccttgaaggcacagtgtcc

SEQ ID NO: 1632 - RNA, 19 nt, synthetic construct
  source 1..19: mol_type = other RNA
gacactgtgccttcaaggg

SEQ ID NO: 1633 - RNA, 19 nt, synthetic construct
  source 1..19: mol_type = other RNA
cccttgaaggcacagtgtc

SEQ ID NO: 1634 - RNA, 19 nt, synthetic construct
  source 1..19: mol_type = other RNA
tgtgccttcaagggatgag

SEQ ID NO: 1635 - RNA, 19 nt, synthetic construct
  source 1..19: mol_type = other RNA
ctcatcccttgaaggcaca

SEQ ID NO: 1636 - RNA, 19 nt, synthetic construct
  source 1..19: mol_type = other RNA
ccttcaagggatgagctat

SEQ ID NO: 1637 - RNA, 19 nt, synthetic construct
  source 1..19: mol_type = other RNA
atagctcatcccttgaagg

SEQ ID NO: 1638 - RNA, 19 nt, synthetic construct
  source 1..19: mol_type = other RNA
cttcaagggatgagctatg

SEQ ID NO: 1639 - RNA, 19 nt, synthetic construct
  source 1..19: mol_type = other RNA
catagctcatcccttgaag

SEQ ID NO: 1640 - RNA, 19 nt, synthetic construct
  source 1..19: mol_type = other RNA
ttttctaaagggctattca

SEQ ID NO: 1641 - RNA, 19 nt, synthetic construct
  source 1..19: mol_type = other RNA
tgaatagccctttagaaaa

SEQ ID NO: 1642 - RNA, 19 nt, synthetic construct
  source 1..19: mol_type = other RNA
tttctaaagggctattcat

SEQ ID NO: 1643 - RNA, 19 nt, synthetic construct
  source 1..19: mol_type = other RNA
atgaatagccctttagaaa

SEQ ID NO: 1644 - RNA, 19 nt, synthetic construct
  source 1..19: mol_type = other RNA
ttctaaagggctattcatc

SEQ ID NO: 1645 - RNA, 19 nt, synthetic construct
  source 1..19: mol_type = other RNA
gatgaatagccctttagaa

SEQ ID NO: 1646 - RNA, 19 nt, synthetic construct
  source 1..19: mol_type = other RNA
tctaaagggctattcatct

SEQ ID NO: 1647 - RNA, 19 nt, synthetic construct
  source 1..19: mol_type = other RNA
agatgaatagccctttaga

SEQ ID NO: 1648 - RNA, 19 nt, synthetic construct
  source 1..19: mol_type = other RNA
ctaaagggctattcatctg

SEQ ID NO: 1649 - RNA, 19 nt, synthetic construct
  source 1..19: mol_type = other RNA
cagatgaatagccctttag

SEQ ID NO: 1650 - RNA, 19 nt, synthetic construct
  source 1..19: mol_type = other RNA
taaagggctattcatctgt

SEQ ID NO: 1651 - RNA, 19 nt, synthetic construct
  source 1..19: mol_type = other RNA
acagatgaatagcccttta

SEQ ID NO: 1652 - RNA, 19 nt, synthetic construct
  source 1..19: mol_type = other RNA
aaagggctattcatctgtt

SEQ ID NO: 1653 - RNA, 19 nt, synthetic construct
  source 1..19: mol_type = other RNA
aacagatgaatagcccttt

SEQ ID NO: 1654 - RNA, 19 nt, synthetic construct
  source 1..19: mol_type = other RNA
aagggctattcatctgttt

SEQ ID NO: 1655 - RNA, 19 nt, synthetic construct
  source 1..19: mol_type = other RNA
aaacagatgaatagccctt

SEQ ID NO: 1656 - RNA, 19 nt, synthetic construct
  source 1..19: mol_type = other RNA
gggctattcatctgtttgc

SEQ ID NO: 1657 - RNA, 19 nt, synthetic construct
  source 1..19: mol_type = other RNA
gcaaacagatgaatagccc

SEQ ID NO: 1658 - RNA, 19 nt, synthetic construct
  source 1..19: mol_type = other RNA
ggctattcatctgtttgct

SEQ ID NO: 1659 - RNA, 19 nt, synthetic construct
  source 1..19: mol_type = other RNA
agcaaacagatgaatagcc

SEQ ID NO: 1660 - RNA, 19 nt, synthetic construct
  source 1..19: mol_type = other RNA
gctattcatctgtttgctc

SEQ ID NO: 1661 - RNA, 19 nt, synthetic construct
  source 1..19: mol_type = other RNA
gagcaaacagatgaatagc

SEQ ID NO: 1662 - RNA, 19 nt, synthetic construct
  source 1..19: mol_type = other RNA
tattcatctgtttgctcca

SEQ ID NO: 1663 - RNA, 19 nt, synthetic construct
  source 1..19: mol_type = other RNA
tggagcaaacagatgaata

SEQ ID NO: 1664 - RNA, 19 nt, synthetic construct
  source 1..19: mol_type = other RNA
attcatctgtttgctccag

SEQ ID NO: 1665 - RNA, 19 nt, synthetic construct
  source 1..19: mol_type = other RNA
ctggagcaaacagatgaat

SEQ ID NO: 1666 - RNA, 19 nt, synthetic construct
  source 1..19: mol_type = other RNA
ttcatctgtttgctccagt

SEQ ID NO: 1667 - RNA, 19 nt, synthetic construct
  source 1..19: mol_type = other RNA
actggagcaaacagatgaa

SEQ ID NO: 1668 - RNA, 19 nt, synthetic construct
  source 1..19: mol_type = other RNA
tcatctgtttgctccagtt

SEQ ID NO: 1669 - RNA, 19 nt, synthetic construct
  source 1..19: mol_type = other RNA
aactggagcaaacagatga

SEQ ID NO: 1670 - RNA, 19 nt, synthetic construct
  source 1..19: mol_type = other RNA
catctgtttgctccagttt

SEQ ID NO: 1671 - RNA, 19 nt, synthetic construct
  source 1..19: mol_type = other RNA
aaactggagcaaacagatg

SEQ ID NO: 1672 - RNA, 19 nt, synthetic construct
  source 1..19: mol_type = other RNA
tgtttgctccagttttctg

SEQ ID NO: 1673 - RNA, 19 nt, synthetic construct
  source 1..19: mol_type = other RNA
cagaaaactggagcaaaca

SEQ ID NO: 1674 - RNA, 19 nt, synthetic construct
  source 1..19: mol_type = other RNA
tgctccagttttctgtttt

SEQ ID NO: 1675 - RNA, 19 nt, synthetic construct
  source 1..19: mol_type = other RNA
aaaacagaaaactggagca

SEQ ID NO: 1676 - RNA, 19 nt, synthetic construct
  source 1..19: mol_type = other RNA
tttgttttgttcttagtgg

SEQ ID NO: 1677 - RNA, 19 nt, synthetic construct
  source 1..19: mol_type = other RNA
ccactaagaacaaaacaaa

SEQ ID NO: 1678 - RNA, 19 nt, synthetic construct
  source 1..19: mol_type = other RNA
tgttttgttcttagtggtc

SEQ ID NO: 1679 - RNA, 19 nt, synthetic construct
  source 1..19: mol_type = other RNA
gaccactaagaacaaaaca

SEQ ID NO: 1680 - RNA, 19 nt, synthetic construct
  source 1..19: mol_type = other RNA
gttttgttcttagtggtca

SEQ ID NO: 1681 - RNA, 19 nt, synthetic construct
  source 1..19: mol_type = other RNA
tgaccactaagaacaaaac

SEQ ID NO: 1682 - RNA, 19 nt, synthetic construct
  source 1..19: mol_type = other RNA
ttttgttcttagtggtcac

SEQ ID NO: 1683 - RNA, 19 nt, synthetic construct
  source 1..19: mol_type = other RNA
gtgaccactaagaacaaaa

SEQ ID NO: 1684 - RNA, 19 nt, synthetic construct
  source 1..19: mol_type = other RNA
tttgttcttagtggtcaca

SEQ ID NO: 1685 - RNA, 19 nt, synthetic construct
  source 1..19: mol_type = other RNA
tgtgaccactaagaacaaa

SEQ ID NO: 1686 - RNA, 19 nt, synthetic construct
  source 1..19: mol_type = other RNA
ttgttcttagtggtcacag

SEQ ID NO: 1687 - RNA, 19 nt, synthetic construct
  source 1..19: mol_type = other RNA
ctgtgaccactaagaacaa

SEQ ID NO: 1688 - RNA, 19 nt, synthetic construct
  source 1..19: mol_type = other RNA
tgttcttagtggtcacagt

SEQ ID NO: 1689 - RNA, 19 nt, synthetic construct
  source 1..19: mol_type = other RNA
actgtgaccactaagaaca

SEQ ID NO: 1690 - RNA, 19 nt, synthetic construct
  source 1..19: mol_type = other RNA
gttcttagtggtcacagtc

SEQ ID NO: 1691 - RNA, 19 nt, synthetic construct
  source 1..19: mol_type = other RNA
gactgtgaccactaagaac

SEQ ID NO: 1692 - RNA, 19 nt, synthetic construct
  source 1..19: mol_type = other RNA
ttcttagtggtcacagtca

SEQ ID NO: 1693 - RNA, 19 nt, synthetic construct
  source 1..19: mol_type = other RNA
tgactgtgaccactaagaa

SEQ ID NO: 1694 - RNA, 19 nt, synthetic construct
  source 1..19: mol_type = other RNA
tcttagtggtcacagtcat

SEQ ID NO: 1695 - RNA, 19 nt, synthetic construct
  source 1..19: mol_type = other RNA
atgactgtgaccactaaga

SEQ ID NO: 1696 - RNA, 19 nt, synthetic construct
  source 1..19: mol_type = other RNA
cttagtggtcacagtcatc

SEQ ID NO: 1697 - RNA, 19 nt, synthetic construct
  source 1..19: mol_type = other RNA
gatgactgtgaccactaag

SEQ ID NO: 1698 - RNA, 19 nt, synthetic construct
  source 1..19: mol_type = other RNA
ttagtggtcacagtcatct

SEQ ID NO: 1699 - RNA, 19 nt, synthetic construct
  source 1..19: mol_type = other RNA
agatgactgtgaccactaa

SEQ ID NO: 1700 - RNA, 19 nt, synthetic construct
  source 1..19: mol_type = other RNA
tagtggtcacagtcatcta

SEQ ID NO: 1701 - RNA, 19 nt, synthetic construct
  source 1..19: mol_type = other RNA
tagatgactgtgaccacta

SEQ ID NO: 1702 - RNA, 19 nt, synthetic construct
  source 1..19: mol_type = other RNA
agtggtcacagtcatctaa

SEQ ID NO: 1703 - RNA, 19 nt, synthetic construct
  source 1..19: mol_type = other RNA
ttagatgactgtgaccact

SEQ ID NO: 1704 - RNA, 19 nt, synthetic construct
  source 1..19: mol_type = other RNA
gtggtcacagtcatctaac

SEQ ID NO: 1705 - RNA, 19 nt, synthetic construct
  source 1..19: mol_type = other RNA
gttagatgactgtgaccac

SEQ ID NO: 1706 - RNA, 19 nt, synthetic construct
  source 1..19: mol_type = other RNA
tggtcacagtcatctaacc

SEQ ID NO: 1707 - RNA, 19 nt, synthetic construct
  source 1..19: mol_type = other RNA
ggttagatgactgtgacca

SEQ ID NO: 1708 - RNA, 19 nt, synthetic construct
  source 1..19: mol_type = other RNA
ggtcacagtcatctaacca

SEQ ID NO: 1709 - RNA, 19 nt, synthetic construct
  source 1..19: mol_type = other RNA
tggttagatgactgtgacc

SEQ ID NO: 1710 - RNA, 19 nt, synthetic construct
  source 1..19: mol_type = other RNA
gtcacagtcatctaaccaa

SEQ ID NO: 1711 - RNA, 19 nt, synthetic construct
  source 1..19: mol_type = other RNA
ttggttagatgactgtgac

SEQ ID NO: 1712 - RNA, 19 nt, synthetic construct
  source 1..19: mol_type = other RNA
tcacagtcatctaaccaaa

SEQ ID NO: 1713 - RNA, 19 nt, synthetic construct
  source 1..19: mol_type = other RNA
tttggttagatgactgtga

SEQ ID NO: 1714 - RNA, 19 nt, synthetic construct
  source 1..19: mol_type = other RNA
tctaaccaaagtgatctag

SEQ ID NO: 1715 - RNA, 19 nt, synthetic construct
  source 1..19: mol_type = other RNA
ctagatcactttggttaga

SEQ ID NO: 1716 - RNA, 19 nt, synthetic construct
  source 1..19: mol_type = other RNA
caaagtgatctagtgtgat

SEQ ID NO: 1717 - RNA, 19 nt, synthetic construct
  source 1..19: mol_type = other RNA
atcacactagatcactttg

SEQ ID NO: 1718 - RNA, 19 nt, synthetic construct
  source 1..19: mol_type = other RNA
aaagtgatctagtgtgata

SEQ ID NO: 1719 - RNA, 19 nt, synthetic construct
  source 1..19: mol_type = other RNA
tatcacactagatcacttt

SEQ ID NO: 1720 - RNA, 19 nt, synthetic construct
  source 1..19: mol_type = other RNA
aagtgatctagtgtgatag

SEQ ID NO: 1721 - RNA, 19 nt, synthetic construct
  source 1..19: mol_type = other RNA
ctatcacactagatcactt

SEQ ID NO: 1722 - RNA, 19 nt, synthetic construct
  source 1..19: mol_type = other RNA
caacccaaatttcccaaga

SEQ ID NO: 1723 - RNA, 19 nt, synthetic construct
  source 1..19: mol_type = other RNA
tcttgggaaatttgggttg

SEQ ID NO: 1724 - RNA, 19 nt, synthetic construct
  source 1..19: mol_type = other RNA
aaatttcccaagacggctg

SEQ ID NO: 1725 - RNA, 19 nt, synthetic construct
  source 1..19: mol_type = other RNA
cagccgtcttgggaaattt

SEQ ID NO: 1726 - RNA, 19 nt, synthetic construct
  source 1..19: mol_type = other RNA
aatttcccaagacggctga

SEQ ID NO: 1727 - RNA, 19 nt, synthetic construct
  source 1..19: mol_type = other RNA
tcagccgtcttgggaaatt

SEQ ID NO: 1728 - RNA, 19 nt, synthetic construct
  source 1..19: mol_type = other RNA
atttcccaagacggctgaa

SEQ ID NO: 1729 - RNA, 19 nt, synthetic construct
  source 1..19: mol_type = other RNA
ttcagccgtcttgggaaat

SEQ ID NO: 1730 - RNA, 19 nt, synthetic construct
  source 1..19: mol_type = other RNA
actgtaatccagacaccta

SEQ ID NO: 1731 - RNA, 19 nt, synthetic construct
  source 1..19: mol_type = other RNA
taggtgtctggattacagt

SEQ ID NO: 1732 - RNA, 19 nt, synthetic construct
  source 1..19: mol_type = other RNA
ctgtaatccagacacctaa

SEQ ID NO: 1733 - RNA, 19 nt, synthetic construct
  source 1..19: mol_type = other RNA
ttaggtgtctggattacag

SEQ ID NO: 1734 - RNA, 19 nt, synthetic construct
  source 1..19: mol_type = other RNA
tgtaatccagacacctaat

SEQ ID NO: 1735 - RNA, 19 nt, synthetic construct
  source 1..19: mol_type = other RNA
attaggtgtctggattaca

SEQ ID NO: 1736 - RNA, 19 nt, synthetic construct
  source 1..19: mol_type = other RNA
gtaatccagacacctaatt

SEQ ID NO: 1737 - RNA, 19 nt, synthetic construct
  source 1..19: mol_type = other RNA
aattaggtgtctggattac

SEQ ID NO: 1738 - RNA, 19 nt, synthetic construct
  source 1..19: mol_type = other RNA
taatccagacacctaattc

SEQ ID NO: 1739 - RNA, 19 nt, synthetic construct
  source 1..19: mol_type = other RNA
gaattaggtgtctggatta

SEQ ID NO: 1740 - RNA, 19 nt, synthetic construct
  source 1..19: mol_type = other RNA
aatccagacacctaattct

SEQ ID NO: 1741 - RNA, 19 nt, synthetic construct
  source 1..19: mol_type = other RNA
agaattaggtgtctggatt

SEQ ID NO: 1742 - RNA, 19 nt, synthetic construct
  source 1..19: mol_type = other RNA
atccagacacctaattctt

SEQ ID NO: 1743 - RNA, 19 nt, synthetic construct
  source 1..19: mol_type = other RNA
aagaattaggtgtctggat

SEQ ID NO: 1744 - RNA, 19 nt, synthetic construct
  source 1..19: mol_type = other RNA
tccagacacctaattcttc

SEQ ID NO: 1745 - RNA, 19 nt, synthetic construct
  source 1..19: mol_type = other RNA
gaagaattaggtgtctgga

SEQ ID NO: 1746 - RNA, 19 nt, synthetic construct
  source 1..19: mol_type = other RNA
acacctaattcttcagttc

SEQ ID NO: 1747 - RNA, 19 nt, synthetic construct
  source 1..19: mol_type = other RNA
gaactgaagaattaggtgt

SEQ ID NO: 1748 - RNA, 19 nt, synthetic construct
  source 1..19: mol_type = other RNA
ctaattcttcagttcacta

SEQ ID NO: 1749 - RNA, 19 nt, synthetic construct
  source 1..19: mol_type = other RNA
tagtgaactgaagaattag

SEQ ID NO: 1750 - RNA, 19 nt, synthetic construct
  source 1..19: mol_type = other RNA
ttcttcagttcactactca

SEQ ID NO: 1751 - RNA, 19 nt, synthetic construct
  source 1..19: mol_type = other RNA
tgagtagtgaactgaagaa

SEQ ID NO: 1752 - RNA, 19 nt, synthetic construct
  source 1..19: mol_type = other RNA
tcttcagttcactactcat

SEQ ID NO: 1753 - RNA, 19 nt, synthetic construct
  source 1..19: mol_type = other RNA
atgagtagtgaactgaaga

SEQ ID NO: 1754 - RNA, 19 nt, synthetic construct
  source 1..19: mol_type = other RNA
cttcagttcactactcatg

SEQ ID NO: 1755 - RNA, 19 nt, synthetic construct
  source 1..19: mol_type = other RNA
catgagtagtgaactgaag

SEQ ID NO: 1756 - RNA, 19 nt, synthetic construct
  source 1..19: mol_type = other RNA
ttcagttcactactcatgt

SEQ ID NO: 1757 - RNA, 19 nt, synthetic construct
  source 1..19: mol_type = other RNA
acatgagtagtgaactgaa

SEQ ID NO: 1758 - RNA, 19 nt, synthetic construct
  source 1..19: mol_type = other RNA
tcagttcactactcatgtg

SEQ ID NO: 1759 - RNA, 19 nt, synthetic construct
  source 1..19: mol_type = other RNA
cacatgagtagtgaactga

SEQ ID NO: 1760 - RNA, 19 nt, synthetic construct
  source 1..19: mol_type = other RNA
cactactcatgtgatactg

SEQ ID NO: 1761 - RNA, 19 nt, synthetic construct
  source 1..19: mol_type = other RNA
cagtatcacatgagtagtg

SEQ ID NO: 1762 - RNA, 19 nt, synthetic construct
  source 1..19: mol_type = other RNA
actactcatgtgatactga

SEQ ID NO: 1763 - RNA, 19 nt, synthetic construct
  source 1..19: mol_type = other RNA
tcagtatcacatgagtagt

SEQ ID NO: 1764 - RNA, 19 nt, synthetic construct
  source 1..19: mol_type = other RNA
ctactcatgtgatactgat

SEQ ID NO: 1765 - RNA, 19 nt, synthetic construct
  source 1..19: mol_type = other RNA
atcagtatcacatgagtag

SEQ ID NO: 1766 - RNA, 19 nt, synthetic construct
  source 1..19: mol_type = other RNA
tactcatgtgatactgatt

SEQ ID NO: 1767 - RNA, 19 nt, synthetic construct
  source 1..19: mol_type = other RNA
aatcagtatcacatgagta

SEQ ID NO: 1768 - RNA, 19 nt, synthetic construct
  source 1..19: mol_type = other RNA
catgtgatactgattccca

SEQ ID NO: 1769 - RNA, 19 nt, synthetic construct
  source 1..19: mol_type = other RNA
tgggaatcagtatcacatg

SEQ ID NO: 1770 - RNA, 19 nt, synthetic construct
  source 1..19: mol_type = other RNA
atgtgatactgattcccac

SEQ ID NO: 1771 - RNA, 19 nt, synthetic construct
  source 1..19: mol_type = other RNA
gtgggaatcagtatcacat

SEQ ID NO: 1772 - RNA, 19 nt, synthetic construct
  source 1..19: mol_type = other RNA
atactgattcccacattaa

SEQ ID NO: 1773 - RNA, 19 nt, synthetic construct
  source 1..19: mol_type = other RNA
ttaatgtgggaatcagtat

SEQ ID NO: 1774 - RNA, 19 nt, synthetic construct
  source 1..19: mol_type = other RNA
tactgattcccacattaag

SEQ ID NO: 1775 - RNA, 19 nt, synthetic construct
  source 1..19: mol_type = other RNA
cttaatgtgggaatcagta

SEQ ID NO: 1776 - RNA, 19 nt, synthetic construct
  source 1..19: mol_type = other RNA
actgattcccacattaagg

SEQ ID NO: 1777 - RNA, 19 nt, synthetic construct
  source 1..19: mol_type = other RNA
ccttaatgtgggaatcagt

SEQ ID NO: 1778 - RNA, 19 nt, synthetic construct
  source 1..19: mol_type = other RNA
ctgattcccacattaaggt

SEQ ID NO: 1779 - RNA, 19 nt, synthetic construct
  source 1..19: mol_type = other RNA
accttaatgtgggaatcag

SEQ ID NO: 1780 - RNA, 19 nt, synthetic construct
  source 1..19: mol_type = other RNA
tgattcccacattaaggtt

SEQ ID NO: 1781 - RNA, 19 nt, synthetic construct
  source 1..19: mol_type = other RNA
aaccttaatgtgggaatca

SEQ ID NO: 1782 - RNA, 19 nt, synthetic construct
  source 1..19: mol_type = other RNA
gattcccacattaaggttg

SEQ ID NO: 1783 - RNA, 19 nt, synthetic construct
  source 1..19: mol_type = other RNA
caaccttaatgtgggaatc

SEQ ID NO: 1784 - RNA, 19 nt, synthetic construct
  source 1..19: mol_type = other RNA
attcccacattaaggttga

SEQ ID NO: 1785 - RNA, 19 nt, synthetic construct
  source 1..19: mol_type = other RNA
tcaaccttaatgtgggaat

SEQ ID NO: 1786 - RNA, 19 nt, synthetic construct
  source 1..19: mol_type = other RNA
ttcccacattaaggttgaa

SEQ ID NO: 1787 - RNA, 19 nt, synthetic construct
  source 1..19: mol_type = other RNA
ttcaaccttaatgtgggaa

SEQ ID NO: 1788 - RNA, 19 nt, synthetic construct
  source 1..19: mol_type = other RNA
aaagtgatcaccgagctgt

SEQ ID NO: 1789 - RNA, 19 nt, synthetic construct
  source 1..19: mol_type = other RNA
acagctcggtgatcacttt

SEQ ID NO: 1790 - RNA, 19 nt, synthetic construct
  source 1..19: mol_type = other RNA
aagtgatcaccgagctgtc

SEQ ID NO: 1791 - RNA, 19 nt, synthetic construct
  source 1..19: mol_type = other RNA
gacagctcggtgatcactt

SEQ ID NO: 1792 - RNA, 19 nt, synthetic construct
  source 1..19: mol_type = other RNA
agtgatcaccgagctgtca

SEQ ID NO: 1793 - RNA, 19 nt, synthetic construct
  source 1..19: mol_type = other RNA
tgacagctcggtgatcact

SEQ ID NO: 1794 - RNA, 19 nt, synthetic construct
  source 1..19: mol_type = other RNA
atcaccgagctgtcacatc

SEQ ID NO: 1795 - RNA, 19 nt, synthetic construct
  source 1..19: mol_type = other RNA
gatgtgacagctcggtgat

SEQ ID NO: 1796 - RNA, 19 nt, synthetic construct
  source 1..19: mol_type = other RNA
tcaccgagctgtcacatca

SEQ ID NO: 1797 - RNA, 19 nt, synthetic construct
  source 1..19: mol_type = other RNA
tgatgtgacagctcggtga

SEQ ID NO: 1798 - RNA, 19 nt, synthetic construct
  source 1..19: mol_type = other RNA
ctgtcacatcagcaaatat

SEQ ID NO: 1799 - RNA, 19 nt, synthetic construct
  source 1..19: mol_type = other RNA
atatttgctgatgtgacag

SEQ ID NO: 1800 - RNA, 19 nt, synthetic construct
  source 1..19: mol_type = other RNA
tgtcacatcagcaaatatg

SEQ ID NO: 1801 - RNA, 19 nt, synthetic construct
  source 1..19: mol_type = other RNA
catatttgctgatgtgaca

SEQ ID NO: 1802 - RNA, 19 nt, synthetic construct
  source 1..19: mol_type = other RNA
catcagcaaatatgtagtc

SEQ ID NO: 1803 - RNA, 19 nt, synthetic construct
  source 1..19: mol_type = other RNA
gactacatatttgctgatg

SEQ ID NO: 1804 - RNA, 19 nt, synthetic construct
  source 1..19: mol_type = other RNA
agcaaatatgtagtcaagg

SEQ ID NO: 1805 - RNA, 19 nt, synthetic construct
  source 1..19: mol_type = other RNA
ccttgactacatatttgct

SEQ ID NO: 1806 - RNA, 19 nt, synthetic construct
  source 1..19: mol_type = other RNA
gcaaatatgtagtcaaggc

SEQ ID NO: 1807 - RNA, 19 nt, synthetic construct
  source 1..19: mol_type = other RNA
gccttgactacatatttgc

SEQ ID NO: 1808 - RNA, 19 nt, synthetic construct
  source 1..19: mol_type = other RNA
caaatatgtagtcaaggca

SEQ ID NO: 1809 - RNA, 19 nt, synthetic construct
  source 1..19: mol_type = other RNA
tgccttgactacatatttg

SEQ ID NO: 1810 - RNA, 19 nt, synthetic construct
  source 1..19: mol_type = other RNA
caggccaactagaccacac

SEQ ID NO: 1811 - RNA, 19 nt, synthetic construct
  source 1..19: mol_type = other RNA
gtgtggtctagttggcctg

SEQ ID NO: 1812 - RNA, 19 nt, synthetic construct
  source 1..19: mol_type = other RNA
aggccaactagaccacact

SEQ ID NO: 1813 - RNA, 19 nt, synthetic construct
  source 1..19: mol_type = other RNA
agtgtggtctagttggcct

SEQ ID NO: 1814 - RNA, 19 nt, synthetic construct
  source 1..19: mol_type = other RNA
ggccaactagaccacactt

SEQ ID NO: 1815 - RNA, 19 nt, synthetic construct
  source 1..19: mol_type = other RNA
aagtgtggtctagttggcc

SEQ ID NO: 1816 - RNA, 19 nt, synthetic construct
  source 1..19: mol_type = other RNA
gccaactagaccacactta

SEQ ID NO: 1817 - RNA, 19 nt, synthetic construct
  source 1..19: mol_type = other RNA
taagtgtggtctagttggc

SEQ ID NO: 1818 - RNA, 19 nt, synthetic construct
  source 1..19: mol_type = other RNA
caactagaccacacttatt

SEQ ID NO: 1819 - RNA, 19 nt, synthetic construct
  source 1..19: mol_type = other RNA
aataagtgtggtctagttg

SEQ ID NO: 1820 - RNA, 19 nt, synthetic construct
  source 1..19: mol_type = other RNA
aactagaccacacttattg

SEQ ID NO: 1821 - RNA, 19 nt, synthetic construct
  source 1..19: mol_type = other RNA
caataagtgtggtctagtt

SEQ ID NO: 1822 - RNA, 19 nt, synthetic construct
  source 1..19: mol_type = other RNA
acttattggtctagtttgt

SEQ ID NO: 1823 - RNA, 19 nt, synthetic construct
  source 1..19: mol_type = other RNA
acaaactagaccaataagt

SEQ ID NO: 1824 - RNA, 19 nt, synthetic construct
  source 1..19: mol_type = other RNA
cttattggtctagtttgtc

SEQ ID NO: 1825 - RNA, 19 nt, synthetic construct
  source 1..19: mol_type = other RNA
gacaaactagaccaataag

SEQ ID NO: 1826 - RNA, 19 nt, synthetic construct
  source 1..19: mol_type = other RNA
ttattggtctagtttgtcc

SEQ ID NO: 1827 - RNA, 19 nt, synthetic construct
  source 1..19: mol_type = other RNA
ggacaaactagaccaataa

SEQ ID NO: 1828 - RNA, 19 nt, synthetic construct
  source 1..19: mol_type = other RNA
tattggtctagtttgtccg

SEQ ID NO: 1829 - RNA, 19 nt, synthetic construct
  source 1..19: mol_type = other RNA
cggacaaactagaccaata

SEQ ID NO: 1830 - RNA, 19 nt, synthetic construct
  source 1..19: mol_type = other RNA
attggtctagtttgtccgt

SEQ ID NO: 1831 - RNA, 19 nt, synthetic construct
  source 1..19: mol_type = other RNA
acggacaaactagaccaat

SEQ ID NO: 1832 - RNA, 19 nt, synthetic construct
  source 1..19: mol_type = other RNA
gtctagtttgtccgtttta

SEQ ID NO: 1833 - RNA, 19 nt, synthetic construct
  source 1..19: mol_type = other RNA
taaaacggacaaactagac

SEQ ID NO: 1834 - RNA, 19 nt, synthetic construct
  source 1..19: mol_type = other RNA
tctagtttgtccgttttat

SEQ ID NO: 1835 - RNA, 19 nt, synthetic construct
  source 1..19: mol_type = other RNA
ataaaacggacaaactaga

SEQ ID NO: 1836 - RNA, 19 nt, synthetic construct
  source 1..19: mol_type = other RNA
tttgtccgttttatatgac

SEQ ID NO: 1837 - RNA, 19 nt, synthetic construct
  source 1..19: mol_type = other RNA
gtcatataaaacggacaaa

SEQ ID NO: 1838 - RNA, 19 nt, synthetic construct
  source 1..19: mol_type = other RNA
gtccgttttatatgacatt

SEQ ID NO: 1839 - RNA, 19 nt, synthetic construct
  source 1..19: mol_type = other RNA
aatgtcatataaaacggac

SEQ ID NO: 1840 - RNA, 19 nt, synthetic construct
  source 1..19: mol_type = other RNA
tccgttttatatgacattg

SEQ ID NO: 1841 - RNA, 19 nt, synthetic construct
  source 1..19: mol_type = other RNA
caatgtcatataaaacgga

SEQ ID NO: 1842 - RNA, 19 nt, synthetic construct
  source 1..19: mol_type = other RNA
ccgttttatatgacattga

SEQ ID NO: 1843 - RNA, 19 nt, synthetic construct
  source 1..19: mol_type = other RNA
tcaatgtcatataaaacgg

SEQ ID NO: 1844 - RNA, 19 nt, synthetic construct
  source 1..19: mol_type = other RNA
cttgtgtgtgcaacttttg

SEQ ID NO: 1845 - RNA, 19 nt, synthetic construct
  source 1..19: mol_type = other RNA
caaaagttgcacacacaag

SEQ ID NO: 1846 - RNA, 19 nt, synthetic construct
  source 1..19: mol_type = other RNA
ttgtgtgtgcaacttttgg

SEQ ID NO: 1847 - RNA, 19 nt, synthetic construct
  source 1..19: mol_type = other RNA
ccaaaagttgcacacacaa

SEQ ID NO: 1848 - RNA, 19 nt, synthetic construct
  source 1..19: mol_type = other RNA
tgtgtgtgcaacttttggg

SEQ ID NO: 1849 - RNA, 19 nt, synthetic construct
  source 1..19: mol_type = other RNA
cccaaaagttgcacacaca

SEQ ID NO: 1850 - RNA, 19 nt, synthetic construct
  source 1..19: mol_type = other RNA
ggacaggaatcacttaaaa

SEQ ID NO: 1851 - RNA, 19 nt, synthetic construct
  source 1..19: mol_type = other RNA
ttttaagtgattcctgtcc

SEQ ID NO: 1852 - RNA, 19 nt, synthetic construct
  source 1..19: mol_type = other RNA
gacaggaatcacttaaaat

SEQ ID NO: 1853 - RNA, 19 nt, synthetic construct
  source 1..19: mol_type = other RNA
attttaagtgattcctgtc

SEQ ID NO: 1854 - RNA, 19 nt, synthetic construct
  source 1..19: mol_type = other RNA
acaggaatcacttaaaatc

SEQ ID NO: 1855 - RNA, 19 nt, synthetic construct
  source 1..19: mol_type = other RNA
gattttaagtgattcctgt

SEQ ID NO: 1856 - RNA, 19 nt, synthetic construct
  source 1..19: mol_type = other RNA
aaaatcttagtccctgtta

SEQ ID NO: 1857 - RNA, 19 nt, synthetic construct
  source 1..19: mol_type = other RNA
taacagggactaagatttt

SEQ ID NO: 1858 - RNA, 19 nt, synthetic construct
  source 1..19: mol_type = other RNA
aaatcttagtccctgttat

SEQ ID NO: 1859 - RNA, 19 nt, synthetic construct
  source 1..19: mol_type = other RNA
ataacagggactaagattt

SEQ ID NO: 1860 - RNA, 19 nt, synthetic construct
  source 1..19: mol_type = other RNA
aatcttagtccctgttatc

SEQ ID NO: 1861 - RNA, 19 nt, synthetic construct
  source 1..19: mol_type = other RNA
gataacagggactaagatt

SEQ ID NO: 1862 - RNA, 19 nt, synthetic construct
  source 1..19: mol_type = other RNA
atcttagtccctgttatcc

SEQ ID NO: 1863 - RNA, 19 nt, synthetic construct
  source 1..19: mol_type = other RNA
ggataacagggactaagat

SEQ ID NO: 1864 - RNA, 19 nt, synthetic construct
  source 1..19: mol_type = other RNA
tagtccctgttatccagta

SEQ ID NO: 1865 - RNA, 19 nt, synthetic construct
  source 1..19: mol_type = other RNA
tactggataacagggacta

SEQ ID NO: 1866 - RNA, 19 nt, synthetic construct
  source 1..19: mol_type = other RNA
agtccctgttatccagtag

SEQ ID NO: 1867 - RNA, 19 nt, synthetic construct
  source 1..19: mol_type = other RNA
ctactggataacagggact

SEQ ID NO: 1868 - RNA, 19 nt, synthetic construct
  source 1..19: mol_type = other RNA
gtccctgttatccagtagg

SEQ ID NO: 1869 - RNA, 19 nt, synthetic construct
  source 1..19: mol_type = other RNA
cctactggataacagggac

SEQ ID NO: 1870 - RNA, 19 nt, synthetic construct
  source 1..19: mol_type = other RNA
tggcctgtgaccatcatgg

SEQ ID NO: 1871 - RNA, 19 nt, synthetic construct
  source 1..19: mol_type = other RNA
ccatgatggtcacaggcca

SEQ ID NO: 1872 - RNA, 19 nt, synthetic construct
  source 1..19: mol_type = other RNA
ggcctgtgaccatcatggc

SEQ ID NO: 1873 - RNA, 19 nt, synthetic construct
  source 1..19: mol_type = other RNA
gccatgatggtcacaggcc

SEQ ID NO: 1874 - RNA, 19 nt, synthetic construct
  source 1..19: mol_type = other RNA
gcctgtgaccatcatggca

SEQ ID NO: 1875 - RNA, 19 nt, synthetic construct
  source 1..19: mol_type = other RNA
tgccatgatggtcacaggc

SEQ ID NO: 1876 - RNA, 19 nt, synthetic construct
  source 1..19: mol_type = other RNA
cctgtgaccatcatggcag

SEQ ID NO: 1877 - RNA, 19 nt, synthetic construct
  source 1..19: mol_type = other RNA
ctgccatgatggtcacagg

SEQ ID NO: 1878 - RNA, 19 nt, synthetic construct
  source 1..19: mol_type = other RNA
ctgtgaccatcatggcagt

SEQ ID NO: 1879 - RNA, 19 nt, synthetic construct
  source 1..19: mol_type = other RNA
actgccatgatggtcacag

SEQ ID NO: 1880 - RNA, 19 nt, synthetic construct
  source 1..19: mol_type = other RNA
tgtgaccatcatggcagtt

SEQ ID NO: 1881 - RNA, 19 nt, synthetic construct
  source 1..19: mol_type = other RNA
aactgccatgatggtcaca

SEQ ID NO: 1882 - RNA, 19 nt, synthetic construct
  source 1..19: mol_type = other RNA
gtgaccatcatggcagttg

SEQ ID NO: 1883 - RNA, 19 nt, synthetic construct
  source 1..19: mol_type = other RNA
caactgccatgatggtcac

SEQ ID NO: 1884 - RNA, 19 nt, synthetic construct
  source 1..19: mol_type = other RNA
tgaccatcatggcagttgg

SEQ ID NO: 1885 - RNA, 19 nt, synthetic construct
  source 1..19: mol_type = other RNA
ccaactgccatgatggtca

SEQ ID NO: 1886 - RNA, 19 nt, synthetic construct
  source 1..19: mol_type = other RNA
gaccatcatggcagttgga

SEQ ID NO: 1887 - RNA, 19 nt, synthetic construct
  source 1..19: mol_type = other RNA
tccaactgccatgatggtc

SEQ ID NO: 1888 - RNA, 19 nt, synthetic construct
  source 1..19: mol_type = other RNA
accatcatggcagttggag

SEQ ID NO: 1889 - RNA, 19 nt, synthetic construct
  source 1..19: mol_type = other RNA
ctccaactgccatgatggt

SEQ ID NO: 1890 - RNA, 19 nt, synthetic construct
  source 1..19: mol_type = other RNA
tctcatatagaggtgacca

SEQ ID NO: 1891 - RNA, 19 nt, synthetic construct
  source 1..19: mol_type = other RNA
tggtcacctctatatgaga

SEQ ID NO: 1892 - RNA, 19 nt, synthetic construct
  source 1..19: mol_type = other RNA
atatagaggtgaccagttt

SEQ ID NO: 1893 - RNA, 19 nt, synthetic construct
  source 1..19: mol_type = other RNA
aaactggtcacctctatat

SEQ ID NO: 1894 - RNA, 19 nt, synthetic construct
  source 1..19: mol_type = other RNA
tatagaggtgaccagtttg

SEQ ID NO: 1895 - RNA, 19 nt, synthetic construct
  source 1..19: mol_type = other RNA
caaactggtcacctctata

SEQ ID NO: 1896 - RNA, 19 nt, synthetic construct
  source 1..19: mol_type = other RNA
atagaggtgaccagtttgc

SEQ ID NO: 1897 - RNA, 19 nt, synthetic construct
  source 1..19: mol_type = other RNA
gcaaactggtcacctctat

SEQ ID NO: 1898 - RNA, 19 nt, synthetic construct
  source 1..19: mol_type = other RNA
tagaggtgaccagtttgcc

SEQ ID NO: 1899 - RNA, 19 nt, synthetic construct
  source 1..19: mol_type = other RNA
ggcaaactggtcacctcta

SEQ ID NO: 1900 - RNA, 19 nt, synthetic construct
  source 1..19: mol_type = other RNA
agaggtgaccagtttgcca

SEQ ID NO: 1901 - RNA, 19 nt, synthetic construct
  source 1..19: mol_type = other RNA
tggcaaactggtcacctct

SEQ ID NO: 1902 - RNA, 19 nt, synthetic construct
  source 1..19: mol_type = other RNA
gtgaccagtttgccatgtg

SEQ ID NO: 1903 - RNA, 19 nt, synthetic construct
  source 1..19: mol_type = other RNA
cacatggcaaactggtcac

SEQ ID NO: 1904 - RNA, 19 nt, synthetic construct
  source 1..19: mol_type = other RNA
tgaccagtttgccatgtgg

SEQ ID NO: 1905 - RNA, 19 nt, synthetic construct
  source 1..19: mol_type = other RNA
ccacatggcaaactggtca

SEQ ID NO: 1906 - RNA, 19 nt, synthetic construct
  source 1..19: mol_type = other RNA
gaccagtttgccatgtgga

SEQ ID NO: 1907 - RNA, 19 nt, synthetic construct
  source 1..19: mol_type = other RNA
tccacatggcaaactggtc

SEQ ID NO: 1908 - RNA, 19 nt, synthetic construct
  source 1..19: mol_type = other RNA
accagtttgccatgtggat

SEQ ID NO: 1909 - RNA, 19 nt, synthetic construct
  source 1..19: mol_type = other RNA
atccacatggcaaactggt

SEQ ID NO: 1910 - RNA, 19 nt, synthetic construct
  source 1..19: mol_type = other RNA
ccagtttgccatgtggata

SEQ ID NO: 1911 - RNA, 19 nt, synthetic construct
  source 1..19: mol_type = other RNA
tatccacatggcaaactgg

SEQ ID NO: 1912 - RNA, 19 nt, synthetic construct
  source 1..19: mol_type = other RNA
cagtttgccatgtggatat

SEQ ID NO: 1913 - RNA, 19 nt, synthetic construct
  source 1..19: mol_type = other RNA
atatccacatggcaaactg

SEQ ID NO: 1914 - RNA, 19 nt, synthetic construct
  source 1..19: mol_type = other RNA
agtttgccatgtggatata

SEQ ID NO: 1915 - RNA, 19 nt, synthetic construct
  source 1..19: mol_type = other RNA
tatatccacatggcaaact

SEQ ID NO: 1916 - RNA, 19 nt, synthetic construct
  source 1..19: mol_type = other RNA
gtttgccatgtggatataa

SEQ ID NO: 1917 - RNA, 19 nt, synthetic construct
  source 1..19: mol_type = other RNA
ttatatccacatggcaaac

SEQ ID NO: 1918 - RNA, 19 nt, synthetic construct
  source 1..19: mol_type = other RNA
tttgccatgtggatataat

SEQ ID NO: 1919 - RNA, 19 nt, synthetic construct
  source 1..19: mol_type = other RNA
attatatccacatggcaaa

SEQ ID NO: 1920 - RNA, 19 nt, synthetic construct
  source 1..19: mol_type = other RNA
ccatgtggatataatttag

SEQ ID NO: 1921 - RNA, 19 nt, synthetic construct
  source 1..19: mol_type = other RNA
ctaaattatatccacatgg

SEQ ID NO: 1922 - RNA, 19 nt, synthetic construct
  source 1..19: mol_type = other RNA
gtagatatttgacagtttg

SEQ ID NO: 1923 - RNA, 19 nt, synthetic construct
  source 1..19: mol_type = other RNA
caaactgtcaaatatctac

SEQ ID NO: 1924 - RNA, 19 nt, synthetic construct
  source 1..19: mol_type = other RNA
agatatttgacagtttgtg

SEQ ID NO: 1925 - RNA, 19 nt, synthetic construct
  source 1..19: mol_type = other RNA
cacaaactgtcaaatatct

SEQ ID NO: 1926 - RNA, 19 nt, synthetic construct
  source 1..19: mol_type = other RNA
gatatttgacagtttgtgt

SEQ ID NO: 1927 - RNA, 19 nt, synthetic construct
  source 1..19: mol_type = other RNA
acacaaactgtcaaatatc

SEQ ID NO: 1928 - RNA, 19 nt, synthetic construct
  source 1..19: mol_type = other RNA
tatttgacagtttgtgtag

SEQ ID NO: 1929 - RNA, 19 nt, synthetic construct
  source 1..19: mol_type = other RNA
ctacacaaactgtcaaata

SEQ ID NO: 1930 - RNA, 19 nt, synthetic construct
  source 1..19: mol_type = other RNA
atttgacagtttgtgtagg

SEQ ID NO: 1931 - RNA, 19 nt, synthetic construct
  source 1..19: mol_type = other RNA
cctacacaaactgtcaaat

SEQ ID NO: 1932 - RNA, 19 nt, synthetic construct
  source 1..19: mol_type = other RNA
tttgacagtttgtgtaggt

SEQ ID NO: 1933 - RNA, 19 nt, synthetic construct
  source 1..19: mol_type = other RNA
acctacacaaactgtcaaa

SEQ ID NO: 1934 - RNA, 19 nt, synthetic construct
  source 1..19: mol_type = other RNA
ttgacagtttgtgtaggta

SEQ ID NO: 1935 - RNA, 19 nt, synthetic construct
  source 1..19: mol_type = other RNA
tacctacacaaactgtcaa

SEQ ID NO: 1936 - RNA, 19 nt, synthetic construct
  source 1..19: mol_type = other RNA
agtttgtgtaggtatttga

SEQ ID NO: 1937 - RNA, 19 nt, synthetic construct
  source 1..19: mol_type = other RNA
tcaaatacctacacaaact

SEQ ID NO: 1938 - RNA, 19 nt, synthetic construct
  source 1..19: mol_type = other RNA
actcgagtcaggatgctct

SEQ ID NO: 1939 - RNA, 19 nt, synthetic construct
  source 1..19: mol_type = other RNA
agagcatcctgactcgagt

SEQ ID NO: 1940 - RNA, 19 nt, synthetic construct
  source 1..19: mol_type = other RNA
ctcgagtcaggatgctcta

SEQ ID NO: 1941 - RNA, 19 nt, synthetic construct
  source 1..19: mol_type = other RNA
tagagcatcctgactcgag

SEQ ID NO: 1942 - RNA, 19 nt, synthetic construct
  source 1..19: mol_type = other RNA
tcgagtcaggatgctctat

SEQ ID NO: 1943 - RNA, 19 nt, synthetic construct
  source 1..19: mol_type = other RNA
atagagcatcctgactcga

SEQ ID NO: 1944 - RNA, 19 nt, synthetic construct
  source 1..19: mol_type = other RNA
cgagtcaggatgctctatt

SEQ ID NO: 1945 - RNA, 19 nt, synthetic construct
  source 1..19: mol_type = other RNA
aatagagcatcctgactcg

SEQ ID NO: 1946 - RNA, 19 nt, synthetic construct
  source 1..19: mol_type = other RNA
gagtcaggatgctctattt

SEQ ID NO: 1947 - RNA, 19 nt, synthetic construct
  source 1..19: mol_type = other RNA
aaatagagcatcctgactc

SEQ ID NO: 1948 - RNA, 19 nt, synthetic construct
  source 1..19: mol_type = other RNA
gtcaggatgctctatttat

SEQ ID NO: 1949 - RNA, 19 nt, synthetic construct
  source 1..19: mol_type = other RNA
ataaatagagcatcctgac

SEQ ID NO: 1950 - RNA, 19 nt, synthetic construct
  source 1..19: mol_type = other RNA
ggatgctctatttataaag

SEQ ID NO: 1951 - RNA, 19 nt, synthetic construct
  source 1..19: mol_type = other RNA
ctttataaatagagcatcc

SEQ ID NO: 1952 - RNA, 19 nt, synthetic construct
  source 1..19: mol_type = other RNA
taatatataaagggtgagg

SEQ ID NO: 1953 - RNA, 19 nt, synthetic construct
  source 1..19: mol_type = other RNA
cctcaccctttatatatta

SEQ ID NO: 1954 - RNA, 19 nt, synthetic construct
  source 1..19: mol_type = other RNA
aatatataaagggtgagga

SEQ ID NO: 1955 - RNA, 19 nt, synthetic construct
  source 1..19: mol_type = other RNA
tcctcaccctttatatatt

SEQ ID NO: 1956 - RNA, 19 nt, synthetic construct
  source 1..19: mol_type = other RNA
atatataaagggtgaggac

SEQ ID NO: 1957 - RNA, 19 nt, synthetic construct
  source 1..19: mol_type = other RNA
gtcctcaccctttatatat

SEQ ID NO: 1958 - RNA, 19 nt, synthetic construct
  source 1..19: mol_type = other RNA
tatataaagggtgaggact

SEQ ID NO: 1959 - RNA, 19 nt, synthetic construct
  source 1..19: mol_type = other RNA
agtcctcaccctttatata

SEQ ID NO: 1960 - RNA, 19 nt, synthetic construct
  source 1..19: mol_type = other RNA
aaagggtgaggactggctg

SEQ ID NO: 1961 - RNA, 19 nt, synthetic construct
  source 1..19: mol_type = other RNA
cagccagtcctcacccttt

SEQ ID NO: 1962 - RNA, 19 nt, synthetic construct
  source 1..19: mol_type = other RNA
agggtgaggactggctgtg

SEQ ID NO: 1963 - RNA, 19 nt, synthetic construct
  source 1..19: mol_type = other RNA
cacagccagtcctcaccct

SEQ ID NO: 1964 - RNA, 19 nt, synthetic construct
  source 1..19: mol_type = other RNA
ggtgaggactggctgtgca

SEQ ID NO: 1965 - RNA, 19 nt, synthetic construct
  source 1..19: mol_type = other RNA
tgcacagccagtcctcacc

SEQ ID NO: 1966 - RNA, 19 nt, synthetic construct
  source 1..19: mol_type = other RNA
gactggctgtgcatcctgc

SEQ ID NO: 1967 - RNA, 19 nt, synthetic construct
  source 1..19: mol_type = other RNA
gcaggatgcacagccagtc

SEQ ID NO: 1968 - RNA, 19 nt, synthetic construct
  source 1..19: mol_type = other RNA
tggctgtgcatcctgccct

SEQ ID NO: 1969 - RNA, 19 nt, synthetic construct
  source 1..19: mol_type = other RNA
agggcaggatgcacagcca

SEQ ID NO: 1970 - RNA, 19 nt, synthetic construct
  source 1..19: mol_type = other RNA
gctgtgcatcctgccctgt

SEQ ID NO: 1971 - RNA, 19 nt, synthetic construct
  source 1..19: mol_type = other RNA
acagggcaggatgcacagc

SEQ ID NO: 1972 - RNA, 19 nt, synthetic construct
  source 1..19: mol_type = other RNA
gggtttgcgcgctgctaca

SEQ ID NO: 1973 - RNA, 19 nt, synthetic construct
  source 1..19: mol_type = other RNA
tgtagcagcgcgcaaaccc

SEQ ID NO: 1974 - RNA, 19 nt, synthetic construct
  source 1..19: mol_type = other RNA
ggtttgcgcgctgctacag

SEQ ID NO: 1975 - RNA, 19 nt, synthetic construct
  source 1..19: mol_type = other RNA
ctgtagcagcgcgcaaacc

SEQ ID NO: 1976 - RNA, 19 nt, synthetic construct
  source 1..19: mol_type = other RNA
gtttgcgcgctgctacaga

SEQ ID NO: 1977 - RNA, 19 nt, synthetic construct
  source 1..19: mol_type = other RNA
tctgtagcagcgcgcaaac

SEQ ID NO: 1978 - RNA, 19 nt, synthetic construct
  source 1..19: mol_type = other RNA
tttgcgcgctgctacagag

SEQ ID NO: 1979 - RNA, 19 nt, synthetic construct
  source 1..19: mol_type = other RNA
ctctgtagcagcgcgcaaa

SEQ ID NO: 1980 - RNA, 19 nt, synthetic construct
  source 1..19: mol_type = other RNA
ttgcgcgctgctacagagc

SEQ ID NO: 1981 - RNA, 19 nt, synthetic construct
  source 1..19: mol_type = other RNA
gctctgtagcagcgcgcaa

SEQ ID NO: 1982 - RNA, 19 nt, synthetic construct
  source 1..19: mol_type = other RNA
tgcgcgctgctacagagct

SEQ ID NO: 1983 - RNA, 19 nt, synthetic construct
  source 1..19: mol_type = other RNA
agctctgtagcagcgcgca

SEQ ID NO: 1984 - RNA, 19 nt, synthetic construct
  source 1..19: mol_type = other RNA
ctgctacagagcttcacgc

SEQ ID NO: 1985 - RNA, 19 nt, synthetic construct
  source 1..19: mol_type = other RNA
gcgtgaagctctgtagcag

SEQ ID NO: 1986 - RNA, 19 nt, synthetic construct
  source 1..19: mol_type = other RNA
tgctacagagcttcacgct

SEQ ID NO: 1987 - RNA, 19 nt, synthetic construct
  source 1..19: mol_type = other RNA
agcgtgaagctctgtagca

SEQ ID NO: 1988 - RNA, 19 nt, synthetic construct
  source 1..19: mol_type = other RNA
agcttcacgctctccgctc

SEQ ID NO: 1989 - RNA, 19 nt, synthetic construct
  source 1..19: mol_type = other RNA
gagcggagagcgtgaagct

SEQ ID NO: 1990 - RNA, 19 nt, synthetic construct
  source 1..19: mol_type = other RNA
cttcacgctctccgctcca

SEQ ID NO: 1991 - RNA, 19 nt, synthetic construct
  source 1..19: mol_type = other RNA
tggagcggagagcgtgaag

SEQ ID NO: 1992 - RNA, 19 nt, synthetic construct
  source 1..19: mol_type = other RNA
ttcacgctctccgctccac

SEQ ID NO: 1993 - RNA, 19 nt, synthetic construct
  source 1..19: mol_type = other RNA
gtggagcggagagcgtgaa

SEQ ID NO: 1994 - RNA, 19 nt, synthetic construct
  source 1..19: mol_type = other RNA
agacagagcacattttcag

SEQ ID NO: 1995 - RNA, 19 nt, synthetic construct
  source 1..19: mol_type = other RNA
ctgaaaatgtgctctgtct

SEQ ID NO: 1996 - RNA, 19 nt, synthetic construct
  source 1..19: mol_type = other RNA
gacagagcacattttcagg

SEQ ID NO: 1997 - RNA, 19 nt, synthetic construct
  source 1..19: mol_type = other RNA
cctgaaaatgtgctctgtc

SEQ ID NO: 1998 - RNA, 19 nt, synthetic construct
  source 1..19: mol_type = other RNA
agcacattttcaggccagc

SEQ ID NO: 1999 - RNA, 19 nt, synthetic construct
  source 1..19: mol_type = other RNA
gctggcctgaaaatgtgct

SEQ ID NO: 2000 - RNA, 19 nt, synthetic construct
  source 1..19: mol_type = other RNA
gcacattttcaggccagca

SEQ ID NO: 2001 - RNA, 19 nt, synthetic construct
  source 1..19: mol_type = other RNA
tgctggcctgaaaatgtgc

SEQ ID NO: 2002 - RNA, 19 nt, synthetic construct
  source 1..19: mol_type = other RNA
cattttcaggccagcaact

SEQ ID NO: 2003 - RNA, 19 nt, synthetic construct
  source 1..19: mol_type = other RNA
agttgctggcctgaaaatg

SEQ ID NO: 2004 - RNA, 19 nt, synthetic construct
  source 1..19: mol_type = other RNA
caaaatgggcgaagatatt

SEQ ID NO: 2005 - RNA, 19 nt, synthetic construct
  source 1..19: mol_type = other RNA
aatatcttcgcccattttg

SEQ ID NO: 2006 - RNA, 19 nt, synthetic construct
  source 1..19: mol_type = other RNA
ttgtctttaggataaggca

SEQ ID NO: 2007 - RNA, 19 nt, synthetic construct
  source 1..19: mol_type = other RNA
tgccttatcctaaagacaa

SEQ ID NO: 2008 - RNA, 19 nt, synthetic construct
  source 1..19: mol_type = other RNA
acagatgttgcagacttcc

SEQ ID NO: 2009 - RNA, 19 nt, synthetic construct
  source 1..19: mol_type = other RNA
ggaagtctgcaacatctgt

SEQ ID NO: 2010 - RNA, 19 nt, synthetic construct
  source 1..19: mol_type = other RNA
cagatgttgcagacttcca

SEQ ID NO: 2011 - RNA, 19 nt, synthetic construct
  source 1..19: mol_type = other RNA
tggaagtctgcaacatctg

SEQ ID NO: 2012 - RNA, 19 nt, synthetic construct
  source 1..19: mol_type = other RNA
agatgttgcagacttccac

SEQ ID NO: 2013 - RNA, 19 nt, synthetic construct
  source 1..19: mol_type = other RNA
gtggaagtctgcaacatct

SEQ ID NO: 2014 - RNA, 19 nt, synthetic construct
  source 1..19: mol_type = other RNA
ttggttcggcaatctgatt

SEQ ID NO: 2015 - RNA, 19 nt, synthetic construct
  source 1..19: mol_type = other RNA
aatcagattgccgaaccaa

SEQ ID NO: 2016 - RNA, 19 nt, synthetic construct
  source 1..19: mol_type = other RNA
ttcggcaatctgattctcc

SEQ ID NO: 2017 - RNA, 19 nt, synthetic construct
  source 1..19: mol_type = other RNA
ggagaatcagattgccgaa

SEQ ID NO: 2018 - RNA, 19 nt, synthetic construct
  source 1..19: mol_type = other RNA
tcggcaatctgattctcct

SEQ ID NO: 2019 - RNA, 19 nt, synthetic construct
  source 1..19: mol_type = other RNA
aggagaatcagattgccga

SEQ ID NO: 2020 - RNA, 19 nt, synthetic construct
  source 1..19: mol_type = other RNA
cggcaatctgattctcctg

SEQ ID NO: 2021 - RNA, 19 nt, synthetic construct
  source 1..19: mol_type = other RNA
caggagaatcagattgccg

SEQ ID NO: 2022 - RNA, 19 nt, synthetic construct
  source 1..19: mol_type = other RNA
ggcaatctgattctcctga

SEQ ID NO: 2023 - RNA, 19 nt, synthetic construct
  source 1..19: mol_type = other RNA
tcaggagaatcagattgcc

SEQ ID NO: 2024 - RNA, 19 nt, synthetic construct
  source 1..19: mol_type = other RNA
gcaatctgattctcctgaa

SEQ ID NO: 2025 - RNA, 19 nt, synthetic construct
  source 1..19: mol_type = other RNA
ttcaggagaatcagattgc

SEQ ID NO: 2026 - RNA, 19 nt, synthetic construct
  source 1..19: mol_type = other RNA
gaatttcccagccaggctc

SEQ ID NO: 2027 - RNA, 19 nt, synthetic construct
  source 1..19: mol_type = other RNA
gagcctggctgggaaattc

SEQ ID NO: 2028 - RNA, 19 nt, synthetic construct
  source 1..19: mol_type = other RNA
aatttcccagccaggctct

SEQ ID NO: 2029 - RNA, 19 nt, synthetic construct
  source 1..19: mol_type = other RNA
agagcctggctgggaaatt

SEQ ID NO: 2030 - RNA, 19 nt, synthetic construct
  source 1..19: mol_type = other RNA
atttcccagccaggctctt

SEQ ID NO: 2031 - RNA, 19 nt, synthetic construct
  source 1..19: mol_type = other RNA
aagagcctggctgggaaat

SEQ ID NO: 2032 - RNA, 19 nt, synthetic construct
  source 1..19: mol_type = other RNA
caaatgattctctatctca

SEQ ID NO: 2033 - RNA, 19 nt, synthetic construct
  source 1..19: mol_type = other RNA
tgagatagagaatcatttg

SEQ ID NO: 2034 - RNA, 19 nt, synthetic construct
  source 1..19: mol_type = other RNA
aaatgattctctatctcag

SEQ ID NO: 2035 - RNA, 19 nt, synthetic construct
  source 1..19: mol_type = other RNA
ctgagatagagaatcattt

SEQ ID NO: 2036 - RNA, 19 nt, synthetic construct
  source 1..19: mol_type = other RNA
aatgattctctatctcagg

SEQ ID NO: 2037 - RNA, 19 nt, synthetic construct
  source 1..19: mol_type = other RNA
cctgagatagagaatcatt

SEQ ID NO: 2038 - RNA, 19 nt, synthetic construct
  source 1..19: mol_type = other RNA
atgattctctatctcaggt

SEQ ID NO: 2039 - RNA, 19 nt, synthetic construct
  source 1..19: mol_type = other RNA
acctgagatagagaatcat

SEQ ID NO: 2040 - RNA, 19 nt, synthetic construct
  source 1..19: mol_type = other RNA
tgattctctatctcaggtg

SEQ ID NO: 2041 - RNA, 19 nt, synthetic construct
  source 1..19: mol_type = other RNA
cacctgagatagagaatca

SEQ ID NO: 2042 - RNA, 19 nt, synthetic construct
  source 1..19: mol_type = other RNA
gattctctatctcaggtga

SEQ ID NO: 2043 - RNA, 19 nt, synthetic construct
  source 1..19: mol_type = other RNA
tcacctgagatagagaatc

SEQ ID NO: 2044 - RNA, 19 nt, synthetic construct
  source 1..19: mol_type = other RNA
attctctatctcaggtgag

SEQ ID NO: 2045 - RNA, 19 nt, synthetic construct
  source 1..19: mol_type = other RNA
ctcacctgagatagagaat

SEQ ID NO: 2046 - RNA, 19 nt, synthetic construct
  source 1..19: mol_type = other RNA
aagggctggtcacctgatt

SEQ ID NO: 2047 - RNA, 19 nt, synthetic construct
  source 1..19: mol_type = other RNA
aatcaggtgaccagccctt

SEQ ID NO: 2048 - RNA, 19 nt, synthetic construct
  source 1..19: mol_type = other RNA
gctggtcacctgatttagg

SEQ ID NO: 2049 - RNA, 19 nt, synthetic construct
  source 1..19: mol_type = other RNA
cctaaatcaggtgaccagc

SEQ ID NO: 2050 - RNA, 19 nt, synthetic construct
  source 1..19: mol_type = other RNA
ctggtcacctgatttaggc

SEQ ID NO: 2051 - RNA, 19 nt, synthetic construct
  source 1..19: mol_type = other RNA
gcctaaatcaggtgaccag

SEQ ID NO: 2052 - RNA, 19 nt, synthetic construct
  source 1..19: mol_type = other RNA
tggtcacctgatttaggcc

SEQ ID NO: 2053 - RNA, 19 nt, synthetic construct
  source 1..19: mol_type = other RNA
ggcctaaatcaggtgacca

SEQ ID NO: 2054 - RNA, 19 nt, synthetic construct
  source 1..19: mol_type = other RNA
ggtcacctgatttaggcca

SEQ ID NO: 2055 - RNA, 19 nt, synthetic construct
  source 1..19: mol_type = other RNA
tggcctaaatcaggtgacc

SEQ ID NO: 2056 - RNA, 19 nt, synthetic construct
  source 1..19: mol_type = other RNA
gtcacctgatttaggccag

SEQ ID NO: 2057 - RNA, 19 nt, synthetic construct
  source 1..19: mol_type = other RNA
ctggcctaaatcaggtgac

SEQ ID NO: 2058 - RNA, 19 nt, synthetic construct
  source 1..19: mol_type = other RNA
tcacctgatttaggccagc

SEQ ID NO: 2059 - RNA, 19 nt, synthetic construct
  source 1..19: mol_type = other RNA
gctggcctaaatcaggtga

SEQ ID NO: 2060 - RNA, 19 nt, synthetic construct
  source 1..19: mol_type = other RNA
cacctgatttaggccagca

SEQ ID NO: 2061 - RNA, 19 nt, synthetic construct
  source 1..19: mol_type = other RNA
tgctggcctaaatcaggtg

SEQ ID NO: 2062 - RNA, 19 nt, synthetic construct
  source 1..19: mol_type = other RNA
acctgatttaggccagcaa

SEQ ID NO: 2063 - RNA, 19 nt, synthetic construct
  source 1..19: mol_type = other RNA
ttgctggcctaaatcaggt

SEQ ID NO: 2064 - RNA, 19 nt, synthetic construct
  source 1..19: mol_type = other RNA
cctgatttaggccagcaac

SEQ ID NO: 2065 - RNA, 19 nt, synthetic construct
  source 1..19: mol_type = other RNA
gttgctggcctaaatcagg

SEQ ID NO: 2066 - RNA, 19 nt, synthetic construct
  source 1..19: mol_type = other RNA
ctgatttaggccagcaacc

SEQ ID NO: 2067 - RNA, 19 nt, synthetic construct
  source 1..19: mol_type = other RNA
ggttgctggcctaaatcag

SEQ ID NO: 2068 - RNA, 19 nt, synthetic construct
  source 1..19: mol_type = other RNA
tgatttaggccagcaacca

SEQ ID NO: 2069 - RNA, 19 nt, synthetic construct
  source 1..19: mol_type = other RNA
tggttgctggcctaaatca

SEQ ID NO: 2070 - RNA, 19 nt, synthetic construct
  source 1..19: mol_type = other RNA
gatttaggccagcaaccag

SEQ ID NO: 2071 - RNA, 19 nt, synthetic construct
  source 1..19: mol_type = other RNA
ctggttgctggcctaaatc

SEQ ID NO: 2072 - RNA, 19 nt, synthetic construct
  source 1..19: mol_type = other RNA
atttaggccagcaaccagg

SEQ ID NO: 2073 - RNA, 19 nt, synthetic construct
  source 1..19: mol_type = other RNA
cctggttgctggcctaaat

SEQ ID NO: 2074 - RNA, 19 nt, synthetic construct
  source 1..19: mol_type = other RNA
tttaggccagcaaccaggg

SEQ ID NO: 2075 - RNA, 19 nt, synthetic construct
  source 1..19: mol_type = other RNA
ccctggttgctggcctaaa

SEQ ID NO: 2076 - RNA, 19 nt, synthetic construct
  source 1..19: mol_type = other RNA
ttaggccagcaaccaggga

SEQ ID NO: 2077 - RNA, 19 nt, synthetic construct
  source 1..19: mol_type = other RNA
tccctggttgctggcctaa

SEQ ID NO: 2078 - RNA, 19 nt, synthetic construct
  source 1..19: mol_type = other RNA
taggccagcaaccagggaa

SEQ ID NO: 2079 - RNA, 19 nt, synthetic construct
  source 1..19: mol_type = other RNA
ttccctggttgctggccta

SEQ ID NO: 2080 - RNA, 19 nt, synthetic construct
  source 1..19: mol_type = other RNA
aggccagcaaccagggaag

SEQ ID NO: 2081 - RNA, 19 nt, synthetic construct
  source 1..19: mol_type = other RNA
cttccctggttgctggcct

SEQ ID NO: 2082 - RNA, 19 nt, synthetic construct
  source 1..19: mol_type = other RNA
gccagcaaccagggaagct

SEQ ID NO: 2083 - RNA, 19 nt, synthetic construct
  source 1..19: mol_type = other RNA
agcttccctggttgctggc

SEQ ID NO: 2084 - RNA, 19 nt, synthetic construct
  source 1..19: mol_type = other RNA
gcaaccagggaagctctta

SEQ ID NO: 2085 - RNA, 19 nt, synthetic construct
  source 1..19: mol_type = other RNA
taagagcttccctggttgc

SEQ ID NO: 2086 - RNA, 19 nt, synthetic construct
  source 1..19: mol_type = other RNA
caaccagggaagctcttag

SEQ ID NO: 2087 - RNA, 19 nt, synthetic construct
  source 1..19: mol_type = other RNA
ctaagagcttccctggttg

SEQ ID NO: 2088 - RNA, 19 nt, synthetic construct
  source 1..19: mol_type = other RNA
aaccagggaagctcttaga

SEQ ID NO: 2089 - RNA, 19 nt, synthetic construct
  source 1..19: mol_type = other RNA
tctaagagcttccctggtt

SEQ ID NO: 2090 - RNA, 19 nt, synthetic construct
  source 1..19: mol_type = other RNA
accagggaagctcttagaa

SEQ ID NO: 2091 - RNA, 19 nt, synthetic construct
  source 1..19: mol_type = other RNA
ttctaagagcttccctggt

SEQ ID NO: 2092 - RNA, 19 nt, synthetic construct
  source 1..19: mol_type = other RNA
ccagggaagctcttagaat

SEQ ID NO: 2093 - RNA, 19 nt, synthetic construct
  source 1..19: mol_type = other RNA
attctaagagcttccctgg

SEQ ID NO: 2094 - RNA, 19 nt, synthetic construct
  source 1..19: mol_type = other RNA
cagggaagctcttagaatc

SEQ ID NO: 2095 - RNA, 19 nt, synthetic construct
  source 1..19: mol_type = other RNA
gattctaagagcttccctg

SEQ ID NO: 2096 - RNA, 19 nt, synthetic construct
  source 1..19: mol_type = other RNA
agggaagctcttagaatcc

SEQ ID NO: 2097 - RNA, 19 nt, synthetic construct
  source 1..19: mol_type = other RNA
ggattctaagagcttccct

SEQ ID NO: 2098 - RNA, 19 nt, synthetic construct
  source 1..19: mol_type = other RNA
ccctaagagtcctttctgc

SEQ ID NO: 2099 - RNA, 19 nt, synthetic construct
  source 1..19: mol_type = other RNA
gcagaaaggactcttaggg

SEQ ID NO: 2100 - RNA, 19 nt, synthetic construct
  source 1..19: mol_type = other RNA
cctaagagtcctttctgct

SEQ ID NO: 2101 - RNA, 19 nt, synthetic construct
  source 1..19: mol_type = other RNA
agcagaaaggactcttagg

SEQ ID NO: 2102 - RNA, 19 nt, synthetic construct
  source 1..19: mol_type = other RNA
ctaagagtcctttctgctt

SEQ ID NO: 2103 - RNA, 19 nt, synthetic construct
  source 1..19: mol_type = other RNA
aagcagaaaggactcttag

SEQ ID NO: 2104 - RNA, 19 nt, synthetic construct
  source 1..19: mol_type = other RNA
taagagtcctttctgcttt

SEQ ID NO: 2105 - RNA, 19 nt, synthetic construct
  source 1..19: mol_type = other RNA
aaagcagaaaggactctta

SEQ ID NO: 2106 - RNA, 19 nt, synthetic construct
  source 1..19: mol_type = other RNA
aagagtcctttctgctttc

SEQ ID NO: 2107 - RNA, 19 nt, synthetic construct
  source 1..19: mol_type = other RNA
gaaagcagaaaggactctt

SEQ ID NO: 2108 - RNA, 19 nt, synthetic construct
  source 1..19: mol_type = other RNA
agagtcctttctgctttct

SEQ ID NO: 2109 - RNA, 19 nt, synthetic construct
  source 1..19: mol_type = other RNA
agaaagcagaaaggactct

SEQ ID NO: 2110 - RNA, 19 nt, synthetic construct
  source 1..19: mol_type = other RNA
ctttctgctttcttcacag

SEQ ID NO: 2111 - RNA, 19 nt, synthetic construct
  source 1..19: mol_type = other RNA
ctgtgaagaaagcagaaag

SEQ ID NO: 2112 - RNA, 19 nt, synthetic construct
  source 1..19: mol_type = other RNA
ctgctttcttcacagattg

SEQ ID NO: 2113 - RNA, 19 nt, synthetic construct
  source 1..19: mol_type = other RNA
caatctgtgaagaaagcag

SEQ ID NO: 2114 - RNA, 19 nt, synthetic construct
  source 1..19: mol_type = other RNA
tgctttcttcacagattga

SEQ ID NO: 2115 - RNA, 19 nt, synthetic construct
  source 1..19: mol_type = other RNA
tcaatctgtgaagaaagca

SEQ ID NO: 2116 - RNA, 19 nt, synthetic construct
  source 1..19: mol_type = other RNA
gctttcttcacagattgat

SEQ ID NO: 2117 - RNA, 19 nt, synthetic construct
  source 1..19: mol_type = other RNA
atcaatctgtgaagaaagc

SEQ ID NO: 2118 - RNA, 19 nt, synthetic construct
  source 1..19: mol_type = other RNA
ctttcttcacagattgatt

SEQ ID NO: 2119 - RNA, 19 nt, synthetic construct
  source 1..19: mol_type = other RNA
aatcaatctgtgaagaaag

SEQ ID NO: 2120 - RNA, 19 nt, synthetic construct
  source 1..19: mol_type = other RNA
tatgtaaaatgcagagttg

SEQ ID NO: 2121 - RNA, 19 nt, synthetic construct
  source 1..19: mol_type = other RNA
caactctgcattttacata

SEQ ID NO: 2122 - RNA, 19 nt, synthetic construct
  source 1..19: mol_type = other RNA
taaaatgcagagttggact

SEQ ID NO: 2123 - RNA, 19 nt, synthetic construct
  source 1..19: mol_type = other RNA
agtccaactctgcatttta

SEQ ID NO: 2124 - RNA, 19 nt, synthetic construct
  source 1..19: mol_type = other RNA
aaatgcagagttggactac

SEQ ID NO: 2125 - RNA, 19 nt, synthetic construct
  source 1..19: mol_type = other RNA
gtagtccaactctgcattt

SEQ ID NO: 2126 - RNA, 19 nt, synthetic construct
  source 1..19: mol_type = other RNA
aatgcagagttggactaca

SEQ ID NO: 2127 - RNA, 19 nt, synthetic construct
  source 1..19: mol_type = other RNA
tgtagtccaactctgcatt

SEQ ID NO: 2128 - RNA, 19 nt, synthetic construct
  source 1..19: mol_type = other RNA
atgcagagttggactacac

SEQ ID NO: 2129 - RNA, 19 nt, synthetic construct
  source 1..19: mol_type = other RNA
gtgtagtccaactctgcat

SEQ ID NO: 2130 - RNA, 19 nt, synthetic construct
  source 1..19: mol_type = other RNA
gcagagttggactacacga

SEQ ID NO: 2131 - RNA, 19 nt, synthetic construct
  source 1..19: mol_type = other RNA
tcgtgtagtccaactctgc

SEQ ID NO: 2132 - RNA, 19 nt, synthetic construct
  source 1..19: mol_type = other RNA
cagagttggactacacgat

SEQ ID NO: 2133 - RNA, 19 nt, synthetic construct
  source 1..19: mol_type = other RNA
atcgtgtagtccaactctg

SEQ ID NO: 2134 - RNA, 19 nt, synthetic construct
  source 1..19: mol_type = other RNA
agagttggactacacgatt

SEQ ID NO: 2135 - RNA, 19 nt, synthetic construct
  source 1..19: mol_type = other RNA
aatcgtgtagtccaactct

SEQ ID NO: 2136 - RNA, 19 nt, synthetic construct
  source 1..19: mol_type = other RNA
gagttggactacacgattt

SEQ ID NO: 2137 - RNA, 19 nt, synthetic construct
  source 1..19: mol_type = other RNA
aaatcgtgtagtccaactc

SEQ ID NO: 2138 - RNA, 19 nt, synthetic construct
  source 1..19: mol_type = other RNA
agttggactacacgatttc

SEQ ID NO: 2139 - RNA, 19 nt, synthetic construct
  source 1..19: mol_type = other RNA
gaaatcgtgtagtccaact

SEQ ID NO: 2140 - RNA, 19 nt, synthetic construct
  source 1..19: mol_type = other RNA
gttggactacacgatttct

SEQ ID NO: 2141 - RNA, 19 nt, synthetic construct
  source 1..19: mol_type = other RNA
agaaatcgtgtagtccaac

SEQ ID NO: 2142 - RNA, 19 nt, synthetic construct
  source 1..19: mol_type = other RNA
ttggactacacgatttctt

SEQ ID NO: 2143 - RNA, 19 nt, synthetic construct
  source 1..19: mol_type = other RNA
aagaaatcgtgtagtccaa

SEQ ID NO: 2144 - RNA, 19 nt, synthetic construct
  source 1..19: mol_type = other RNA
tggactacacgatttcttc

SEQ ID NO: 2145 - RNA, 19 nt, synthetic construct
  source 1..19: mol_type = other RNA
gaagaaatcgtgtagtcca

SEQ ID NO: 2146 - RNA, 19 nt, synthetic construct
  source 1..19: mol_type = other RNA
ctacacgatttcttcccac

SEQ ID NO: 2147 - RNA, 19 nt, synthetic construct
  source 1..19: mol_type = other RNA
gtgggaagaaatcgtgtag

SEQ ID NO: 2148 - RNA, 19 nt, synthetic construct
  source 1..19: mol_type = other RNA
tacacgatttcttcccact

SEQ ID NO: 2149 - RNA, 19 nt, synthetic construct
  source 1..19: mol_type = other RNA
agtgggaagaaatcgtgta

SEQ ID NO: 2150 - RNA, 19 nt, synthetic construct
  source 1..19: mol_type = other RNA
acacgatttcttcccactc

SEQ ID NO: 2151 - RNA, 19 nt, synthetic construct
  source 1..19: mol_type = other RNA
gagtgggaagaaatcgtgt

SEQ ID NO: 2152 - RNA, 19 nt, synthetic construct
  source 1..19: mol_type = other RNA
caatctgtcatcctagtat

SEQ ID NO: 2153 - RNA, 19 nt, synthetic construct
  source 1..19: mol_type = other RNA
atactaggatgacagattg

SEQ ID NO: 2154 - RNA, 19 nt, synthetic construct
  source 1..19: mol_type = other RNA
aatctgtcatcctagtata

SEQ ID NO: 2155 - RNA, 19 nt, synthetic construct
  source 1..19: mol_type = other RNA
tatactaggatgacagatt

SEQ ID NO: 2156 - RNA, 19 nt, synthetic construct
  source 1..19: mol_type = other RNA
atctgtcatcctagtatag

SEQ ID NO: 2157 - RNA, 19 nt, synthetic construct
  source 1..19: mol_type = other RNA
ctatactaggatgacagat

SEQ ID NO: 2158 - RNA, 19 nt, synthetic construct
  source 1..19: mol_type = other RNA
tctgtcatcctagtataga

SEQ ID NO: 2159 - RNA, 19 nt, synthetic construct
  source 1..19: mol_type = other RNA
tctatactaggatgacaga

SEQ ID NO: 2160 - RNA, 19 nt, synthetic construct
  source 1..19: mol_type = other RNA
ctgtcatcctagtatagat

SEQ ID NO: 2161 - RNA, 19 nt, synthetic construct
  source 1..19: mol_type = other RNA
atctatactaggatgacag

SEQ ID NO: 2162 - RNA, 19 nt, synthetic construct
  source 1..19: mol_type = other RNA
tgtcatcctagtatagatc

SEQ ID NO: 2163 - RNA, 19 nt, synthetic construct
  source 1..19: mol_type = other RNA
gatctatactaggatgaca

SEQ ID NO: 2164 - RNA, 19 nt, synthetic construct
  source 1..19: mol_type = other RNA
gtcatcctagtatagatca

SEQ ID NO: 2165 - RNA, 19 nt, synthetic construct
  source 1..19: mol_type = other RNA
tgatctatactaggatgac

SEQ ID NO: 2166 - RNA, 19 nt, synthetic construct
  source 1..19: mol_type = other RNA
tcatcctagtatagatcat

SEQ ID NO: 2167 - RNA, 19 nt, synthetic construct
  source 1..19: mol_type = other RNA
atgatctatactaggatga

SEQ ID NO: 2168 - RNA, 19 nt, synthetic construct
  source 1..19: mol_type = other RNA
catcctagtatagatcatg

SEQ ID NO: 2169 - RNA, 19 nt, synthetic construct
  source 1..19: mol_type = other RNA
catgatctatactaggatg

SEQ ID NO: 2170 - RNA, 19 nt, synthetic construct
  source 1..19: mol_type = other RNA
atcctagtatagatcatgg

SEQ ID NO: 2171 - RNA, 19 nt, synthetic construct
  source 1..19: mol_type = other RNA
ccatgatctatactaggat

SEQ ID NO: 2172 - RNA, 19 nt, synthetic construct
  source 1..19: mol_type = other RNA
tcctagtatagatcatggt

SEQ ID NO: 2173 - RNA, 19 nt, synthetic construct
  source 1..19: mol_type = other RNA
accatgatctatactagga

SEQ ID NO: 2174 - RNA, 19 nt, synthetic construct
  source 1..19: mol_type = other RNA
cctagtatagatcatggtg

SEQ ID NO: 2175 - RNA, 19 nt, synthetic construct
  source 1..19: mol_type = other RNA
caccatgatctatactagg

SEQ ID NO: 2176 - RNA, 19 nt, synthetic construct
  source 1..19: mol_type = other RNA
ctagtatagatcatggtgg

SEQ ID NO: 2177 - RNA, 19 nt, synthetic construct
  source 1..19: mol_type = other RNA
ccaccatgatctatactag

SEQ ID NO: 2178 - RNA, 19 nt, synthetic construct
  source 1..19: mol_type = other RNA
tagtatagatcatggtggt

SEQ ID NO: 2179 - RNA, 19 nt, synthetic construct
  source 1..19: mol_type = other RNA
accaccatgatctatacta

SEQ ID NO: 2180 - RNA, 19 nt, synthetic construct
  source 1..19: mol_type = other RNA
agtatagatcatggtggtt

SEQ ID NO: 2181 - RNA, 19 nt, synthetic construct
  source 1..19: mol_type = other RNA
aaccaccatgatctatact

SEQ ID NO: 2182 - RNA, 19 nt, synthetic construct
  source 1..19: mol_type = other RNA
tatagatcatggtggtttc

SEQ ID NO: 2183 - RNA, 19 nt, synthetic construct
  source 1..19: mol_type = other RNA
gaaaccaccatgatctata

SEQ ID NO: 2184 - RNA, 19 nt, synthetic construct
  source 1..19: mol_type = other RNA
atagatcatggtggtttcc

SEQ ID NO: 2185 - RNA, 19 nt, synthetic construct
  source 1..19: mol_type = other RNA
ggaaaccaccatgatctat

SEQ ID NO: 2186 - RNA, 19 nt, synthetic construct
  source 1..19: mol_type = other RNA
atcatggtggtttccctca

SEQ ID NO: 2187 - RNA, 19 nt, synthetic construct
  source 1..19: mol_type = other RNA
tgagggaaaccaccatgat

SEQ ID NO: 2188 - RNA, 19 nt, synthetic construct
  source 1..19: mol_type = other RNA
tcatggtggtttccctcaa

SEQ ID NO: 2189 - RNA, 19 nt, synthetic construct
  source 1..19: mol_type = other RNA
ttgagggaaaccaccatga

SEQ ID NO: 2190 - RNA, 19 nt, synthetic construct
  source 1..19: mol_type = other RNA
catggtggtttccctcaag

SEQ ID NO: 2191 - RNA, 19 nt, synthetic construct
  source 1..19: mol_type = other RNA
cttgagggaaaccaccatg

SEQ ID NO: 2192 - RNA, 19 nt, synthetic construct
  source 1..19: mol_type = other RNA
ggtggtttccctcaagttt

SEQ ID NO: 2193 - RNA, 19 nt, synthetic construct
  source 1..19: mol_type = other RNA
aaacttgagggaaaccacc

SEQ ID NO: 2194 - RNA, 19 nt, synthetic construct
  source 1..19: mol_type = other RNA
gtggtttccctcaagttta

SEQ ID NO: 2195 - RNA, 19 nt, synthetic construct
  source 1..19: mol_type = other RNA
taaacttgagggaaaccac

SEQ ID NO: 2196 - RNA, 19 nt, synthetic construct
  source 1..19: mol_type = other RNA
tggtttccctcaagtttat

SEQ ID NO: 2197 - RNA, 19 nt, synthetic construct
  source 1..19: mol_type = other RNA
ataaacttgagggaaacca

SEQ ID NO: 2198 - RNA, 19 nt, synthetic construct
  source 1..19: mol_type = other RNA
ggtttccctcaagtttatg

SEQ ID NO: 2199 - RNA, 19 nt, synthetic construct
  source 1..19: mol_type = other RNA
cataaacttgagggaaacc

SEQ ID NO: 2200 - RNA, 19 nt, synthetic construct
  source 1..19: mol_type = other RNA
gtttccctcaagtttatgt

SEQ ID NO: 2201 - RNA, 19 nt, synthetic construct
  source 1..19: mol_type = other RNA
acataaacttgagggaaac

SEQ ID NO: 2202 - RNA, 19 nt, synthetic construct
  source 1..19: mol_type = other RNA
tccctcaagtttatgttct

SEQ ID NO: 2203 - RNA, 19 nt, synthetic construct
  source 1..19: mol_type = other RNA
agaacataaacttgaggga

SEQ ID NO: 2204 - RNA, 19 nt, synthetic construct
  source 1..19: mol_type = other RNA
tcaagtttatgttctcatg

SEQ ID NO: 2205 - RNA, 19 nt, synthetic construct
  source 1..19: mol_type = other RNA
catgagaacataaacttga

SEQ ID NO: 2206 - RNA, 19 nt, synthetic construct
  source 1..19: mol_type = other RNA
caagtttatgttctcatgc

SEQ ID NO: 2207 - RNA, 19 nt, synthetic construct
  source 1..19: mol_type = other RNA
gcatgagaacataaacttg

SEQ ID NO: 2208 - RNA, 19 nt, synthetic construct
  source 1..19: mol_type = other RNA
agtttatgttctcatgccc

SEQ ID NO: 2209 - RNA, 19 nt, synthetic construct
  source 1..19: mol_type = other RNA
gggcatgagaacataaact

SEQ ID NO: 2210 - RNA, 19 nt, synthetic construct
  source 1..19: mol_type = other RNA
gtttatgttctcatgccct

SEQ ID NO: 2211 - RNA, 19 nt, synthetic construct
  source 1..19: mol_type = other RNA
agggcatgagaacataaac

SEQ ID NO: 2212 - RNA, 19 nt, synthetic construct
  source 1..19: mol_type = other RNA
tttatgttctcatgccctc

SEQ ID NO: 2213 - RNA, 19 nt, synthetic construct
  source 1..19: mol_type = other RNA
gagggcatgagaacataaa

SEQ ID NO: 2214 - RNA, 19 nt, synthetic construct
  source 1..19: mol_type = other RNA
ttatgttctcatgccctca

SEQ ID NO: 2215 - RNA, 19 nt, synthetic construct
  source 1..19: mol_type = other RNA
tgagggcatgagaacataa

SEQ ID NO: 2216 - RNA, 19 nt, synthetic construct
  source 1..19: mol_type = other RNA
tatgttctcatgccctcaa

SEQ ID NO: 2217 - RNA, 19 nt, synthetic construct
  source 1..19: mol_type = other RNA
ttgagggcatgagaacata

SEQ ID NO: 2218 - RNA, 19 nt, synthetic construct
  source 1..19: mol_type = other RNA
atgttctcatgccctcaat

SEQ ID NO: 2219 - RNA, 19 nt, synthetic construct
  source 1..19: mol_type = other RNA
attgagggcatgagaacat

SEQ ID NO: 2220 - RNA, 19 nt, synthetic construct
  source 1..19: mol_type = other RNA
tgttctcatgccctcaatc

SEQ ID NO: 2221 - RNA, 19 nt, synthetic construct
  source 1..19: mol_type = other RNA
gattgagggcatgagaaca

SEQ ID NO: 2222 - RNA, 19 nt, synthetic construct
  source 1..19: mol_type = other RNA
gttctcatgccctcaatct

SEQ ID NO: 2223 - RNA, 19 nt, synthetic construct
  source 1..19: mol_type = other RNA
agattgagggcatgagaac

SEQ ID NO: 2224 - RNA, 19 nt, synthetic construct
  source 1..19: mol_type = other RNA
ttctcatgccctcaatctg

SEQ ID NO: 2225 - RNA, 19 nt, synthetic construct
  source 1..19: mol_type = other RNA
cagattgagggcatgagaa

SEQ ID NO: 2226 - RNA, 19 nt, synthetic construct
  source 1..19: mol_type = other RNA
tctcatgccctcaatctgt

SEQ ID NO: 2227 - RNA, 19 nt, synthetic construct
  source 1..19: mol_type = other RNA
acagattgagggcatgaga

SEQ ID NO: 2228 - RNA, 19 nt, synthetic construct
  source 1..19: mol_type = other RNA
ctcatgccctcaatctgta

SEQ ID NO: 2229 - RNA, 19 nt, synthetic construct
  source 1..19: mol_type = other RNA
tacagattgagggcatgag

SEQ ID NO: 2230 - RNA, 19 nt, synthetic construct
  source 1..19: mol_type = other RNA
tcatgccctcaatctgtaa

SEQ ID NO: 2231 - RNA, 19 nt, synthetic construct
  source 1..19: mol_type = other RNA
ttacagattgagggcatga

SEQ ID NO: 2232 - RNA, 19 nt, synthetic construct
  source 1..19: mol_type = other RNA
catgccctcaatctgtaaa

SEQ ID NO: 2233 - RNA, 19 nt, synthetic construct
  source 1..19: mol_type = other RNA
tttacagattgagggcatg

SEQ ID NO: 2234 - RNA, 19 nt, synthetic construct
  source 1..19: mol_type = other RNA
atgccctcaatctgtaaat

SEQ ID NO: 2235 - RNA, 19 nt, synthetic construct
  source 1..19: mol_type = other RNA
atttacagattgagggcat

SEQ ID NO: 2236 - RNA, 19 nt, synthetic construct
  source 1..19: mol_type = other RNA
tgccctcaatctgtaaatt

SEQ ID NO: 2237 - RNA, 19 nt, synthetic construct
  source 1..19: mol_type = other RNA
aatttacagattgagggca

SEQ ID NO: 2238 - RNA, 19 nt, synthetic construct
  source 1..19: mol_type = other RNA
gccctcaatctgtaaattt

SEQ ID NO: 2239 - RNA, 19 nt, synthetic construct
  source 1..19: mol_type = other RNA
aaatttacagattgagggc

SEQ ID NO: 2240 - RNA, 19 nt, synthetic construct
  source 1..19: mol_type = other RNA
ccctcaatctgtaaatttt

SEQ ID NO: 2241 - RNA, 19 nt, synthetic construct
  source 1..19: mol_type = other RNA
aaaatttacagattgaggg

SEQ ID NO: 2242 - RNA, 19 nt, synthetic construct
  source 1..19: mol_type = other RNA
cctcccaggcatcccatac

SEQ ID NO: 2243 - RNA, 19 nt, synthetic construct
  source 1..19: mol_type = other RNA
gtatgggatgcctgggagg

SEQ ID NO: 2244 - RNA, 19 nt, synthetic construct
  source 1..19: mol_type = other RNA
ctcccaggcatcccatacc

SEQ ID NO: 2245 - RNA, 19 nt, synthetic construct
  source 1..19: mol_type = other RNA
ggtatgggatgcctgggag

SEQ ID NO: 2246 - RNA, 19 nt, synthetic construct
  source 1..19: mol_type = other RNA
tcccaggcatcccatacca

SEQ ID NO: 2247 - RNA, 19 nt, synthetic construct
  source 1..19: mol_type = other RNA
tggtatgggatgcctggga

SEQ ID NO: 2248 - RNA, 19 nt, synthetic construct
  source 1..19: mol_type = other RNA
cccaggcatcccataccag

SEQ ID NO: 2249 - RNA, 19 nt, synthetic construct
  source 1..19: mol_type = other RNA
ctggtatgggatgcctggg

SEQ ID NO: 2250 - RNA, 19 nt, synthetic construct
  source 1..19: mol_type = other RNA
cccataccagcaccgttcc

SEQ ID NO: 2251 - RNA, 19 nt, synthetic construct
  source 1..19: mol_type = other RNA
ggaacggtgctggtatggg

SEQ ID NO: 2252 - RNA, 19 nt, synthetic construct
  source 1..19: mol_type = other RNA
ccataccagcaccgttcct

SEQ ID NO: 2253 - RNA, 19 nt, synthetic construct
  source 1..19: mol_type = other RNA
aggaacggtgctggtatgg

SEQ ID NO: 2254 - RNA, 19 nt, synthetic construct
  source 1..19: mol_type = other RNA
aaccctgagcttcacactt

SEQ ID NO: 2255 - RNA, 19 nt, synthetic construct
  source 1..19: mol_type = other RNA
aagtgtgaagctcagggtt

SEQ ID NO: 2256 - RNA, 19 nt, synthetic construct
  source 1..19: mol_type = other RNA
accctgagcttcacactta

SEQ ID NO: 2257 - RNA, 19 nt, synthetic construct
  source 1..19: mol_type = other RNA
taagtgtgaagctcagggt

SEQ ID NO: 2258 - RNA, 19 nt, synthetic construct
  source 1..19: mol_type = other RNA
ccctgagcttcacacttaa

SEQ ID NO: 2259 - RNA, 19 nt, synthetic construct
  source 1..19: mol_type = other RNA
ttaagtgtgaagctcaggg

SEQ ID NO: 2260 - RNA, 19 nt, synthetic construct
  source 1..19: mol_type = other RNA
cctgagcttcacacttaaa

SEQ ID NO: 2261 - RNA, 19 nt, synthetic construct
  source 1..19: mol_type = other RNA
tttaagtgtgaagctcagg

SEQ ID NO: 2262 - RNA, 19 nt, synthetic construct
  source 1..19: mol_type = other RNA
gagggcccttcagagcaga

SEQ ID NO: 2263 - RNA, 19 nt, synthetic construct
  source 1..19: mol_type = other RNA
tctgctctgaagggccctc

SEQ ID NO: 2264 - RNA, 19 nt, synthetic construct
  source 1..19: mol_type = other RNA
agggcccttcagagcagag

SEQ ID NO: 2265 - RNA, 19 nt, synthetic construct
  source 1..19: mol_type = other RNA
ctctgctctgaagggccct

SEQ ID NO: 2266 - RNA, 19 nt, synthetic construct
  source 1..19: mol_type = other RNA
gggcccttcagagcagagt

SEQ ID NO: 2267 - RNA, 19 nt, synthetic construct
  source 1..19: mol_type = other RNA
actctgctctgaagggccc

SEQ ID NO: 2268 - RNA, 19 nt, synthetic construct
  source 1..19: mol_type = other RNA
cccttcagagcagagtcca

SEQ ID NO: 2269 - RNA, 19 nt, synthetic construct
  source 1..19: mol_type = other RNA
tggactctgctctgaaggg

SEQ ID NO: 2270 - RNA, 19 nt, synthetic construct
  source 1..19: mol_type = other RNA
agagcagagtccacaggcg

SEQ ID NO: 2271 - RNA, 19 nt, synthetic construct
  source 1..19: mol_type = other RNA
cgcctgtggactctgctct

SEQ ID NO: 2272 - RNA, 19 nt, synthetic construct
  source 1..19: mol_type = other RNA
acaggcgggtggtgctaca

SEQ ID NO: 2273 - RNA, 19 nt, synthetic construct
  source 1..19: mol_type = other RNA
tgtagcaccacccgcctgt

SEQ ID NO: 2274 - RNA, 19 nt, synthetic construct
  source 1..19: mol_type = other RNA
gtaagatacactttaagcc

SEQ ID NO: 2275 - RNA, 19 nt, synthetic construct
  source 1..19: mol_type = other RNA
ggcttaaagtgtatcttac

SEQ ID NO: 2276 - RNA, 19 nt, synthetic construct
  source 1..19: mol_type = other RNA
taagatacactttaagcca

SEQ ID NO: 2277 - RNA, 19 nt, synthetic construct
  source 1..19: mol_type = other RNA
tggcttaaagtgtatctta

SEQ ID NO: 2278 - RNA, 19 nt, synthetic construct
  source 1..19: mol_type = other RNA
acactttaagccagacacc

SEQ ID NO: 2279 - RNA, 19 nt, synthetic construct
  source 1..19: mol_type = other RNA
ggtgtctggcttaaagtgt

SEQ ID NO: 2280 - RNA, 19 nt, synthetic construct
  source 1..19: mol_type = other RNA
cactttaagccagacacct

SEQ ID NO: 2281 - RNA, 19 nt, synthetic construct
  source 1..19: mol_type = other RNA
aggtgtctggcttaaagtg

SEQ ID NO: 2282 - RNA, 19 nt, synthetic construct
  source 1..19: mol_type = other RNA
actttaagccagacaccta

SEQ ID NO: 2283 - RNA, 19 nt, synthetic construct
  source 1..19: mol_type = other RNA
taggtgtctggcttaaagt

SEQ ID NO: 2284 - RNA, 19 nt, synthetic construct
  source 1..19: mol_type = other RNA
cttcagttcactgcccatg

SEQ ID NO: 2285 - RNA, 19 nt, synthetic construct
  source 1..19: mol_type = other RNA
catgggcagtgaactgaag

SEQ ID NO: 2286 - RNA, 19 nt, synthetic construct
  source 1..19: mol_type = other RNA
ttcagttcactgcccatgt

SEQ ID NO: 2287 - RNA, 19 nt, synthetic construct
  source 1..19: mol_type = other RNA
acatgggcagtgaactgaa

SEQ ID NO: 2288 - RNA, 19 nt, synthetic construct
  source 1..19: mol_type = other RNA
tcagttcactgcccatgtg

SEQ ID NO: 2289 - RNA, 19 nt, synthetic construct
  source 1..19: mol_type = other RNA
cacatgggcagtgaactga

SEQ ID NO: 2290 - RNA, 19 nt, synthetic construct
  source 1..19: mol_type = other RNA
cactgcccatgtgatactg

SEQ ID NO: 2291 - RNA, 19 nt, synthetic construct
  source 1..19: mol_type = other RNA
cagtatcacatgggcagtg

SEQ ID NO: 2292 - RNA, 19 nt, synthetic construct
  source 1..19: mol_type = other RNA
actgcccatgtgatactga

SEQ ID NO: 2293 - RNA, 19 nt, synthetic construct
  source 1..19: mol_type = other RNA
tcagtatcacatgggcagt

SEQ ID NO: 2294 - RNA, 19 nt, synthetic construct
  source 1..19: mol_type = other RNA
ctgcccatgtgatactgat

SEQ ID NO: 2295 - RNA, 19 nt, synthetic construct
  source 1..19: mol_type = other RNA
atcagtatcacatgggcag

SEQ ID NO: 2296 - RNA, 19 nt, synthetic construct
  source 1..19: mol_type = other RNA
tgcccatgtgatactgatt

SEQ ID NO: 2297 - RNA, 19 nt, synthetic construct
  source 1..19: mol_type = other RNA
aatcagtatcacatgggca

SEQ ID NO: 2298 - RNA, 19 nt, synthetic construct
  source 1..19: mol_type = other RNA
gcccatgtgatactgattg

SEQ ID NO: 2299 - RNA, 19 nt, synthetic construct
  source 1..19: mol_type = other RNA
caatcagtatcacatgggc

SEQ ID NO: 2300 - RNA, 19 nt, synthetic construct
  source 1..19: mol_type = other RNA
cccatgtgatactgattgc

SEQ ID NO: 2301 - RNA, 19 nt, synthetic construct
  source 1..19: mol_type = other RNA
gcaatcagtatcacatggg

SEQ ID NO: 2302 - RNA, 19 nt, synthetic construct
  source 1..19: mol_type = other RNA
ccatgtgatactgattgcc

SEQ ID NO: 2303 - RNA, 19 nt, synthetic construct
  source 1..19: mol_type = other RNA
ggcaatcagtatcacatgg

SEQ ID NO: 2304 - RNA, 19 nt, synthetic construct
  source 1..19: mol_type = other RNA
catgtgatactgattgcca

SEQ ID NO: 2305 - RNA, 19 nt, synthetic construct
  source 1..19: mol_type = other RNA
tggcaatcagtatcacatg

SEQ ID NO: 2306 - RNA, 19 nt, synthetic construct
  source 1..19: mol_type = other RNA
atgtgatactgattgccac

SEQ ID NO: 2307 - RNA, 19 nt, synthetic construct
  source 1..19: mol_type = other RNA
gtggcaatcagtatcacat

SEQ ID NO: 2308 - RNA, 19 nt, synthetic construct
  source 1..19: mol_type = other RNA
atactgattgccacattaa

SEQ ID NO: 2309 - RNA, 19 nt, synthetic construct
  source 1..19: mol_type = other RNA
ttaatgtggcaatcagtat

SEQ ID NO: 2310 - RNA, 19 nt, synthetic construct
  source 1..19: mol_type = other RNA
tactgattgccacattaag

SEQ ID NO: 2311 - RNA, 19 nt, synthetic construct
  source 1..19: mol_type = other RNA
cttaatgtggcaatcagta

SEQ ID NO: 2312 - RNA, 19 nt, synthetic construct
  source 1..19: mol_type = other RNA
actgattgccacattaagg

SEQ ID NO: 2313 - RNA, 19 nt, synthetic construct
  source 1..19: mol_type = other RNA
ccttaatgtggcaatcagt

SEQ ID NO: 2314 - RNA, 19 nt, synthetic construct
  source 1..19: mol_type = other RNA
ctgattgccacattaaggt

SEQ ID NO: 2315 - RNA, 19 nt, synthetic construct
  source 1..19: mol_type = other RNA
accttaatgtggcaatcag

SEQ ID NO: 2316 - RNA, 19 nt, synthetic construct
  source 1..19: mol_type = other RNA
tgattgccacattaaggtt

SEQ ID NO: 2317 - RNA, 19 nt, synthetic construct
  source 1..19: mol_type = other RNA
aaccttaatgtggcaatca

SEQ ID NO: 2318 - RNA, 19 nt, synthetic construct
  source 1..19: mol_type = other RNA
gattgccacattaaggttg

SEQ ID NO: 2319 - RNA, 19 nt, synthetic construct
  source 1..19: mol_type = other RNA
caaccttaatgtggcaatc

SEQ ID NO: 2320 - RNA, 19 nt, synthetic construct
  source 1..19: mol_type = other RNA
attgccacattaaggttga

SEQ ID NO: 2321 - RNA, 19 nt, synthetic construct
  source 1..19: mol_type = other RNA
tcaaccttaatgtggcaat

SEQ ID NO: 2322 - RNA, 19 nt, synthetic construct
  source 1..19: mol_type = other RNA
ttgccacattaaggttgaa

SEQ ID NO: 2323 - RNA, 19 nt, synthetic construct
  source 1..19: mol_type = other RNA
ttcaaccttaatgtggcaa

SEQ ID NO: 2324 - RNA, 19 nt, synthetic construct
  source 1..19: mol_type = other RNA
acagcatggctcagagtct

SEQ ID NO: 2325 - RNA, 19 nt, synthetic construct
  source 1..19: mol_type = other RNA
agactctgagccatgctgt

SEQ ID NO: 2326 - RNA, 19 nt, synthetic construct
  source 1..19: mol_type = other RNA
catggctcagagtctagag

SEQ ID NO: 2327 - RNA, 19 nt, synthetic construct
  source 1..19: mol_type = other RNA
ctctagactctgagccatg

SEQ ID NO: 2328 - RNA, 19 nt, synthetic construct
  source 1..19: mol_type = other RNA
aaagtgatcaccaagctgt

SEQ ID NO: 2329 - RNA, 19 nt, synthetic construct
  source 1..19: mol_type = other RNA
acagcttggtgatcacttt

SEQ ID NO: 2330 - RNA, 19 nt, synthetic construct
  source 1..19: mol_type = other RNA
aagtgatcaccaagctgtc

SEQ ID NO: 2331 - RNA, 19 nt, synthetic construct
  source 1..19: mol_type = other RNA
gacagcttggtgatcactt

SEQ ID NO: 2332 - RNA, 19 nt, synthetic construct
  source 1..19: mol_type = other RNA
agtgatcaccaagctgtct

SEQ ID NO: 2333 - RNA, 19 nt, synthetic construct
  source 1..19: mol_type = other RNA
agacagcttggtgatcact

SEQ ID NO: 2334 - RNA, 19 nt, synthetic construct
  source 1..19: mol_type = other RNA
gtgatcaccaagctgtctc

SEQ ID NO: 2335 - RNA, 19 nt, synthetic construct
  source 1..19: mol_type = other RNA
gagacagcttggtgatcac

SEQ ID NO: 2336 - RNA, 19 nt, synthetic construct
  source 1..19: mol_type = other RNA
tgatcaccaagctgtctca

SEQ ID NO: 2337 - RNA, 19 nt, synthetic construct
  source 1..19: mol_type = other RNA
tgagacagcttggtgatca

SEQ ID NO: 2338 - RNA, 19 nt, synthetic construct
  source 1..19: mol_type = other RNA
gatcaccaagctgtctcat

SEQ ID NO: 2339 - RNA, 19 nt, synthetic construct
  source 1..19: mol_type = other RNA
atgagacagcttggtgatc

SEQ ID NO: 2340 - RNA, 19 nt, synthetic construct
  source 1..19: mol_type = other RNA
tcaccaagctgtctcatca

SEQ ID NO: 2341 - RNA, 19 nt, synthetic construct
  source 1..19: mol_type = other RNA
tgatgagacagcttggtga

SEQ ID NO: 2342 - RNA, 19 nt, synthetic construct
  source 1..19: mol_type = other RNA
caccaagctgtctcatcac

SEQ ID NO: 2343 - RNA, 19 nt, synthetic construct
  source 1..19: mol_type = other RNA
gtgatgagacagcttggtg

SEQ ID NO: 2344 - RNA, 19 nt, synthetic construct
  source 1..19: mol_type = other RNA
accaagctgtctcatcacc

SEQ ID NO: 2345 - RNA, 19 nt, synthetic construct
  source 1..19: mol_type = other RNA
ggtgatgagacagcttggt

SEQ ID NO: 2346 - RNA, 19 nt, synthetic construct
  source 1..19: mol_type = other RNA
ccaagctgtctcatcacca

SEQ ID NO: 2347 - RNA, 19 nt, synthetic construct
  source 1..19: mol_type = other RNA
tggtgatgagacagcttgg

SEQ ID NO: 2348 - RNA, 19 nt, synthetic construct
  source 1..19: mol_type = other RNA
caagctgtctcatcaccaa

SEQ ID NO: 2349 - RNA, 19 nt, synthetic construct
  source 1..19: mol_type = other RNA
ttggtgatgagacagcttg

SEQ ID NO: 2350 - RNA, 19 nt, synthetic construct
  source 1..19: mol_type = other RNA
aagctgtctcatcaccaaa

SEQ ID NO: 2351 - RNA, 19 nt, synthetic construct
  source 1..19: mol_type = other RNA
tttggtgatgagacagctt

SEQ ID NO: 2352 - RNA, 19 nt, synthetic construct
  source 1..19: mol_type = other RNA
agctgtctcatcaccaaat

SEQ ID NO: 2353 - RNA, 19 nt, synthetic construct
  source 1..19: mol_type = other RNA
atttggtgatgagacagct

SEQ ID NO: 2354 - RNA, 19 nt, synthetic construct
  source 1..19: mol_type = other RNA
gctgtctcatcaccaaata

SEQ ID NO: 2355 - RNA, 19 nt, synthetic construct
  source 1..19: mol_type = other RNA
tatttggtgatgagacagc

SEQ ID NO: 2356 - RNA, 19 nt, synthetic construct
  source 1..19: mol_type = other RNA
tctcatcaccaaataggta

SEQ ID NO: 2357 - RNA, 19 nt, synthetic construct
  source 1..19: mol_type = other RNA
tacctatttggtgatgaga

SEQ ID NO: 2358 - RNA, 19 nt, synthetic construct
  source 1..19: mol_type = other RNA
catcaccaaataggtagtc

SEQ ID NO: 2359 - RNA, 19 nt, synthetic construct
  source 1..19: mol_type = other RNA
gactacctatttggtgatg

SEQ ID NO: 2360 - RNA, 19 nt, synthetic construct
  source 1..19: mol_type = other RNA
atcaccaaataggtagtca

SEQ ID NO: 2361 - RNA, 19 nt, synthetic construct
  source 1..19: mol_type = other RNA
tgactacctatttggtgat

SEQ ID NO: 2362 - RNA, 19 nt, synthetic construct
  source 1..19: mol_type = other RNA
tcaccaaataggtagtcaa

SEQ ID NO: 2363 - RNA, 19 nt, synthetic construct
  source 1..19: mol_type = other RNA
ttgactacctatttggtga

SEQ ID NO: 2364 - RNA, 19 nt, synthetic construct
  source 1..19: mol_type = other RNA
caccaaataggtagtcaag

SEQ ID NO: 2365 - RNA, 19 nt, synthetic construct
  source 1..19: mol_type = other RNA
cttgactacctatttggtg

SEQ ID NO: 2366 - RNA, 19 nt, synthetic construct
  source 1..19: mol_type = other RNA
accaaataggtagtcaagg

SEQ ID NO: 2367 - RNA, 19 nt, synthetic construct
  source 1..19: mol_type = other RNA
ccttgactacctatttggt

SEQ ID NO: 2368 - RNA, 19 nt, synthetic construct
  source 1..19: mol_type = other RNA
ccaaataggtagtcaaggc

SEQ ID NO: 2369 - RNA, 19 nt, synthetic construct
  source 1..19: mol_type = other RNA
gccttgactacctatttgg

SEQ ID NO: 2370 - RNA, 19 nt, synthetic construct
  source 1..19: mol_type = other RNA
caaataggtagtcaaggca

SEQ ID NO: 2371 - RNA, 19 nt, synthetic construct
  source 1..19: mol_type = other RNA
tgccttgactacctatttg

SEQ ID NO: 2372 - RNA, 19 nt, synthetic construct
  source 1..19: mol_type = other RNA
aaataggtagtcaaggcag

SEQ ID NO: 2373 - RNA, 19 nt, synthetic construct
  source 1..19: mol_type = other RNA
ctgccttgactacctattt

SEQ ID NO: 2374 - RNA, 19 nt, synthetic construct
  source 1..19: mol_type = other RNA
aataggtagtcaaggcagc

SEQ ID NO: 2375 - RNA, 19 nt, synthetic construct
  source 1..19: mol_type = other RNA
gctgccttgactacctatt

SEQ ID NO: 2376 - RNA, 19 nt, synthetic construct
  source 1..19: mol_type = other RNA
gcagcttgccttccaccag

SEQ ID NO: 2377 - RNA, 19 nt, synthetic construct
  source 1..19: mol_type = other RNA
ctggtggaaggcaagctgc

SEQ ID NO: 2378 - RNA, 19 nt, synthetic construct
  source 1..19: mol_type = other RNA
cagcttgccttccaccaga

SEQ ID NO: 2379 - RNA, 19 nt, synthetic construct
  source 1..19: mol_type = other RNA
tctggtggaaggcaagctg

SEQ ID NO: 2380 - RNA, 19 nt, synthetic construct
  source 1..19: mol_type = other RNA
agcttgccttccaccagac

SEQ ID NO: 2381 - RNA, 19 nt, synthetic construct
  source 1..19: mol_type = other RNA
gtctggtggaaggcaagct

SEQ ID NO: 2382 - RNA, 19 nt, synthetic construct
  source 1..19: mol_type = other RNA
gcttgccttccaccagacg

SEQ ID NO: 2383 - RNA, 19 nt, synthetic construct
  source 1..19: mol_type = other RNA
cgtctggtggaaggcaagc

SEQ ID NO: 2384 - RNA, 19 nt, synthetic construct
  source 1..19: mol_type = other RNA
cttgccttccaccagacgc

SEQ ID NO: 2385 - RNA, 19 nt, synthetic construct
  source 1..19: mol_type = other RNA
gcgtctggtggaaggcaag

SEQ ID NO: 2386 - RNA, 19 nt, synthetic construct
  source 1..19: mol_type = other RNA
tgccttccaccagacgcca

SEQ ID NO: 2387 - RNA, 19 nt, synthetic construct
  source 1..19: mol_type = other RNA
tggcgtctggtggaaggca

SEQ ID NO: 2388 - RNA, 19 nt, synthetic construct
  source 1..19: mol_type = other RNA
cccgactcactgtgggtac

SEQ ID NO: 2389 - RNA, 19 nt, synthetic construct
  source 1..19: mol_type = other RNA
gtacccacagtgagtcggg

SEQ ID NO: 2390 - RNA, 19 nt, synthetic construct
  source 1..19: mol_type = other RNA
ccgactcactgtgggtacc

SEQ ID NO: 2391 - RNA, 19 nt, synthetic construct
  source 1..19: mol_type = other RNA
ggtacccacagtgagtcgg

SEQ ID NO: 2392 - RNA, 19 nt, synthetic construct
  source 1..19: mol_type = other RNA
cgactcactgtgggtaccc

SEQ ID NO: 2393 - RNA, 19 nt, synthetic construct
  source 1..19: mol_type = other RNA
gggtacccacagtgagtcg

SEQ ID NO: 2394 - RNA, 19 nt, synthetic construct
  source 1..19: mol_type = other RNA
gactcactgtgggtaccct

SEQ ID NO: 2395 - RNA, 19 nt, synthetic construct
  source 1..19: mol_type = other RNA
agggtacccacagtgagtc

SEQ ID NO: 2396 - RNA, 19 nt, synthetic construct
  source 1..19: mol_type = other RNA
actcactgtgggtaccctt

SEQ ID NO: 2397 - RNA, 19 nt, synthetic construct
  source 1..19: mol_type = other RNA
aagggtacccacagtgagt

SEQ ID NO: 2398 - RNA, 19 nt, synthetic construct
  source 1..19: mol_type = other RNA
ctcactgtgggtacccttc

SEQ ID NO: 2399 - RNA, 19 nt, synthetic construct
  source 1..19: mol_type = other RNA
gaagggtacccacagtgag

SEQ ID NO: 2400 - RNA, 19 nt, synthetic construct
  source 1..19: mol_type = other RNA
tcactgtgggtacccttct

SEQ ID NO: 2401 - RNA, 19 nt, synthetic construct
  source 1..19: mol_type = other RNA
agaagggtacccacagtga

SEQ ID NO: 2402 - RNA, 19 nt, synthetic construct
  source 1..19: mol_type = other RNA
cactgtgggtacccttcta

SEQ ID NO: 2403 - RNA, 19 nt, synthetic construct
  source 1..19: mol_type = other RNA
tagaagggtacccacagtg

SEQ ID NO: 2404 - RNA, 19 nt, synthetic construct
  source 1..19: mol_type = other RNA
actgtgggtacccttctac

SEQ ID NO: 2405 - RNA, 19 nt, synthetic construct
  source 1..19: mol_type = other RNA
gtagaagggtacccacagt

SEQ ID NO: 2406 - RNA, 19 nt, synthetic construct
  source 1..19: mol_type = other RNA
ctgtgggtacccttctaca

SEQ ID NO: 2407 - RNA, 19 nt, synthetic construct
  source 1..19: mol_type = other RNA
tgtagaagggtacccacag

SEQ ID NO: 2408 - RNA, 19 nt, synthetic construct
  source 1..19: mol_type = other RNA
tgtgggtacccttctacac

SEQ ID NO: 2409 - RNA, 19 nt, synthetic construct
  source 1..19: mol_type = other RNA
gtgtagaagggtacccaca

SEQ ID NO: 2410 - RNA, 19 nt, synthetic construct
  source 1..19: mol_type = other RNA
gggtacccttctacactga

SEQ ID NO: 2411 - RNA, 19 nt, synthetic construct
  source 1..19: mol_type = other RNA
tcagtgtagaagggtaccc

SEQ ID NO: 2412 - RNA, 19 nt, synthetic construct
  source 1..19: mol_type = other RNA
ttctacactgaccagcaag

SEQ ID NO: 2413 - RNA, 19 nt, synthetic construct
  source 1..19: mol_type = other RNA
cttgctggtcagtgtagaa

SEQ ID NO: 2414 - RNA, 19 nt, synthetic construct
  source 1..19: mol_type = other RNA
tctacactgaccagcaagc

SEQ ID NO: 2415 - RNA, 19 nt, synthetic construct
  source 1..19: mol_type = other RNA
gcttgctggtcagtgtaga

SEQ ID NO: 2416 - RNA, 19 nt, synthetic construct
  source 1..19: mol_type = other RNA
ctacactgaccagcaagct

SEQ ID NO: 2417 - RNA, 19 nt, synthetic construct
  source 1..19: mol_type = other RNA
agcttgctggtcagtgtag

SEQ ID NO: 2418 - RNA, 19 nt, synthetic construct
  source 1..19: mol_type = other RNA
tacactgaccagcaagcta

SEQ ID NO: 2419 - RNA, 19 nt, synthetic construct
  source 1..19: mol_type = other RNA
tagcttgctggtcagtgta

SEQ ID NO: 2420 - RNA, 19 nt, synthetic construct
  source 1..19: mol_type = other RNA
acactgaccagcaagctag

SEQ ID NO: 2421 - RNA, 19 nt, synthetic construct
  source 1..19: mol_type = other RNA
ctagcttgctggtcagtgt

SEQ ID NO: 2422 - RNA, 19 nt, synthetic construct
  source 1..19: mol_type = other RNA
cactgaccagcaagctagg

SEQ ID NO: 2423 - RNA, 19 nt, synthetic construct
  source 1..19: mol_type = other RNA
cctagcttgctggtcagtg

SEQ ID NO: 2424 - RNA, 19 nt, synthetic construct
  source 1..19: mol_type = other RNA
actgaccagcaagctaggc

SEQ ID NO: 2425 - RNA, 19 nt, synthetic construct
  source 1..19: mol_type = other RNA
gcctagcttgctggtcagt

SEQ ID NO: 2426 - RNA, 19 nt, synthetic construct
  source 1..19: mol_type = other RNA
ctcacccaactctaaattg

SEQ ID NO: 2427 - RNA, 19 nt, synthetic construct
  source 1..19: mol_type = other RNA
caatttagagttgggtgag

SEQ ID NO: 2428 - RNA, 19 nt, synthetic construct
  source 1..19: mol_type = other RNA
tcacccaactctaaattgt

SEQ ID NO: 2429 - RNA, 19 nt, synthetic construct
  source 1..19: mol_type = other RNA
acaatttagagttgggtga

SEQ ID NO: 2430 - RNA, 19 nt, synthetic construct
  source 1..19: mol_type = other RNA
cacccaactctaaattgtg

SEQ ID NO: 2431 - RNA, 19 nt, synthetic construct
  source 1..19: mol_type = other RNA
cacaatttagagttgggtg

SEQ ID NO: 2432 - RNA, 19 nt, synthetic construct
  source 1..19: mol_type = other RNA
acccaactctaaattgtgc

SEQ ID NO: 2433 - RNA, 19 nt, synthetic construct
  source 1..19: mol_type = other RNA
gcacaatttagagttgggt

SEQ ID NO: 2434 - RNA, 19 nt, synthetic construct
  source 1..19: mol_type = other RNA
cccaactctaaattgtgcc

SEQ ID NO: 2435 - RNA, 19 nt, synthetic construct
  source 1..19: mol_type = other RNA
ggcacaatttagagttggg

SEQ ID NO: 2436 - RNA, 19 nt, synthetic construct
  source 1..19: mol_type = other RNA
ccaactctaaattgtgccg

SEQ ID NO: 2437 - RNA, 19 nt, synthetic construct
  source 1..19: mol_type = other RNA
cggcacaatttagagttgg

SEQ ID NO: 2438 - RNA, 19 nt, synthetic construct
  source 1..19: mol_type = other RNA
caactctaaattgtgccgc

SEQ ID NO: 2439 - RNA, 19 nt, synthetic construct
  source 1..19: mol_type = other RNA
gcggcacaatttagagttg

SEQ ID NO: 2440 - RNA, 19 nt, synthetic construct
  source 1..19: mol_type = other RNA
aactctaaattgtgccgct

SEQ ID NO: 2441 - RNA, 19 nt, synthetic construct
  source 1..19: mol_type = other RNA
agcggcacaatttagagtt

SEQ ID NO: 2442 - RNA, 19 nt, synthetic construct
  source 1..19: mol_type = other RNA
actctaaattgtgccgctt

SEQ ID NO: 2443 - RNA, 19 nt, synthetic construct
  source 1..19: mol_type = other RNA
aagcggcacaatttagagt

SEQ ID NO: 2444 - RNA, 19 nt, synthetic construct
  source 1..19: mol_type = other RNA
ctctaaattgtgccgctta

SEQ ID NO: 2445 - RNA, 19 nt, synthetic construct
  source 1..19: mol_type = other RNA
taagcggcacaatttagag

SEQ ID NO: 2446 - RNA, 19 nt, synthetic construct
  source 1..19: mol_type = other RNA
taaattgtgccgcttagac

SEQ ID NO: 2447 - RNA, 19 nt, synthetic construct
  source 1..19: mol_type = other RNA
gtctaagcggcacaattta

SEQ ID NO: 2448 - RNA, 19 nt, synthetic construct
  source 1..19: mol_type = other RNA
aaattgtgccgcttagact

SEQ ID NO: 2449 - RNA, 19 nt, synthetic construct
  source 1..19: mol_type = other RNA
agtctaagcggcacaattt

SEQ ID NO: 2450 - RNA, 19 nt, synthetic construct
  source 1..19: mol_type = other RNA
aattgtgccgcttagactt

SEQ ID NO: 2451 - RNA, 19 nt, synthetic construct
  source 1..19: mol_type = other RNA
aagtctaagcggcacaatt

SEQ ID NO: 2452 - RNA, 19 nt, synthetic construct
  source 1..19: mol_type = other RNA
attgtgccgcttagactta

SEQ ID NO: 2453 - RNA, 19 nt, synthetic construct
  source 1..19: mol_type = other RNA
taagtctaagcggcacaat

SEQ ID NO: 2454 - RNA, 19 nt, synthetic construct
  source 1..19: mol_type = other RNA
ttgtgccgcttagacttag

SEQ ID NO: 2455 - RNA, 19 nt, synthetic construct
  source 1..19: mol_type = other RNA
ctaagtctaagcggcacaa

SEQ ID NO: 2456 - RNA, 19 nt, synthetic construct
  source 1..19: mol_type = other RNA
tgtgccgcttagacttagc

SEQ ID NO: 2457 - RNA, 19 nt, synthetic construct
  source 1..19: mol_type = other RNA
gctaagtctaagcggcaca

SEQ ID NO: 2458 - RNA, 19 nt, synthetic construct
  source 1..19: mol_type = other RNA
gtgccgcttagacttagct

SEQ ID NO: 2459 - RNA, 19 nt, synthetic construct
  source 1..19: mol_type = other RNA
agctaagtctaagcggcac

SEQ ID NO: 2460 - RNA, 19 nt, synthetic construct
  source 1..19: mol_type = other RNA
tgccgcttagacttagctg

SEQ ID NO: 2461 - RNA, 19 nt, synthetic construct
  source 1..19: mol_type = other RNA
cagctaagtctaagcggca

SEQ ID NO: 2462 - RNA, 19 nt, synthetic construct
  source 1..19: mol_type = other RNA
gccgcttagacttagctgt

SEQ ID NO: 2463 - RNA, 19 nt, synthetic construct
  source 1..19: mol_type = other RNA
acagctaagtctaagcggc

SEQ ID NO: 2464 - RNA, 19 nt, synthetic construct
  source 1..19: mol_type = other RNA
ccgcttagacttagctgtc

SEQ ID NO: 2465 - RNA, 19 nt, synthetic construct
  source 1..19: mol_type = other RNA
gacagctaagtctaagcgg

SEQ ID NO: 2466 - RNA, 19 nt, synthetic construct
  source 1..19: mol_type = other RNA
gcttagacttagctgtcag

SEQ ID NO: 2467 - RNA, 19 nt, synthetic construct
  source 1..19: mol_type = other RNA
ctgacagctaagtctaagc

SEQ ID NO: 2468 - RNA, 19 nt, synthetic construct
  source 1..19: mol_type = other RNA
cttagacttagctgtcagt

SEQ ID NO: 2469 - RNA, 19 nt, synthetic construct
  source 1..19: mol_type = other RNA
actgacagctaagtctaag

SEQ ID NO: 2470 - RNA, 19 nt, synthetic construct
  source 1..19: mol_type = other RNA
ttagacttagctgtcagtg

SEQ ID NO: 2471 - RNA, 19 nt, synthetic construct
  source 1..19: mol_type = other RNA
cactgacagctaagtctaa

SEQ ID NO: 2472 - RNA, 19 nt, synthetic construct
  source 1..19: mol_type = other RNA
tagacttagctgtcagtgt

SEQ ID NO: 2473 - RNA, 19 nt, synthetic construct
  source 1..19: mol_type = other RNA
acactgacagctaagtcta

SEQ ID NO: 2474 - RNA, 19 nt, synthetic construct
  source 1..19: mol_type = other RNA
agacttagctgtcagtgtg

SEQ ID NO: 2475 - RNA, 19 nt, synthetic construct
  source 1..19: mol_type = other RNA
cacactgacagctaagtct

SEQ ID NO: 2476 - RNA, 19 nt, synthetic construct
  source 1..19: mol_type = other RNA
gacttagctgtcagtgtga

SEQ ID NO: 2477 - RNA, 19 nt, synthetic construct
  source 1..19: mol_type = other RNA
tcacactgacagctaagtc

SEQ ID NO: 2478 - RNA, 19 nt, synthetic construct
  source 1..19: mol_type = other RNA
ggtgattcctaagatttcc

SEQ ID NO: 2479 - RNA, 19 nt, synthetic construct
  source 1..19: mol_type = other RNA
ggaaatcttaggaatcacc

SEQ ID NO: 2480 - RNA, 19 nt, synthetic construct
  source 1..19: mol_type = other RNA
attcctaagatttccttgg

SEQ ID NO: 2481 - RNA, 19 nt, synthetic construct
  source 1..19: mol_type = other RNA
ccaaggaaatcttaggaat

SEQ ID NO: 2482 - RNA, 19 nt, synthetic construct
  source 1..19: mol_type = other RNA
tcctaagatttccttgggt

SEQ ID NO: 2483 - RNA, 19 nt, synthetic construct
  source 1..19: mol_type = other RNA
acccaaggaaatcttagga

SEQ ID NO: 2484 - RNA, 19 nt, synthetic construct
  source 1..19: mol_type = other RNA
cctaagatttccttgggta

SEQ ID NO: 2485 - RNA, 19 nt, synthetic construct
  source 1..19: mol_type = other RNA
tacccaaggaaatcttagg

SEQ ID NO: 2486 - RNA, 19 nt, synthetic construct
  source 1..19: mol_type = other RNA
ctaagatttccttgggtat

SEQ ID NO: 2487 - RNA, 19 nt, synthetic construct
  source 1..19: mol_type = other RNA
atacccaaggaaatcttag

SEQ ID NO: 2488 - RNA, 19 nt, synthetic construct
  source 1..19: mol_type = other RNA
taagatttccttgggtatc

SEQ ID NO: 2489 - RNA, 19 nt, synthetic construct
  source 1..19: mol_type = other RNA
gatacccaaggaaatctta

SEQ ID NO: 2490 - RNA, 19 nt, synthetic construct
  source 1..19: mol_type = other RNA
atttgagtgtgtgcatgtg

SEQ ID NO: 2491 - RNA, 19 nt, synthetic construct
  source 1..19: mol_type = other RNA
cacatgcacacactcaaat

SEQ ID NO: 2492 - RNA, 19 nt, synthetic construct
  source 1..19: mol_type = other RNA
tttgagtgtgtgcatgtgt

SEQ ID NO: 2493 - RNA, 19 nt, synthetic construct
  source 1..19: mol_type = other RNA
acacatgcacacactcaaa

SEQ ID NO: 2494 - RNA, 19 nt, synthetic construct
  source 1..19: mol_type = other RNA
tgtgtgcatgactttaatg

SEQ ID NO: 2495 - RNA, 19 nt, synthetic construct
  source 1..19: mol_type = other RNA
cattaaagtcatgcacaca

SEQ ID NO: 2496 - RNA, 19 nt, synthetic construct
  source 1..19: mol_type = other RNA
gtgtgcatgactttaatga

SEQ ID NO: 2497 - RNA, 19 nt, synthetic construct
  source 1..19: mol_type = other RNA
tcattaaagtcatgcacac

SEQ ID NO: 2498 - RNA, 19 nt, synthetic construct
  source 1..19: mol_type = other RNA
tgtgcatgactttaatgac

SEQ ID NO: 2499 - RNA, 19 nt, synthetic construct
  source 1..19: mol_type = other RNA
gtcattaaagtcatgcaca

SEQ ID NO: 2500 - RNA, 19 nt, synthetic construct
  source 1..19: mol_type = other RNA
gtgcatgactttaatgact

SEQ ID NO: 2501 - RNA, 19 nt, synthetic construct
  source 1..19: mol_type = other RNA
agtcattaaagtcatgcac

SEQ ID NO: 2502 - RNA, 19 nt, synthetic construct
  source 1..19: mol_type = other RNA
tgcatgactttaatgactt

SEQ ID NO: 2503 - RNA, 19 nt, synthetic construct
  source 1..19: mol_type = other RNA
aagtcattaaagtcatgca

SEQ ID NO: 2504 - RNA, 19 nt, synthetic construct
  source 1..19: mol_type = other RNA
gcatgactttaatgacttt

SEQ ID NO: 2505 - RNA, 19 nt, synthetic construct
  source 1..19: mol_type = other RNA
aaagtcattaaagtcatgc

SEQ ID NO: 2506 - RNA, 19 nt, synthetic construct
  source 1..19: mol_type = other RNA
gggttgaaggaagtttggg

SEQ ID NO: 2507 - RNA, 19 nt, synthetic construct
  source 1..19: mol_type = other RNA
cccaaacttccttcaaccc

SEQ ID NO: 2508 - RNA, 19 nt, synthetic construct
  source 1..19: mol_type = other RNA
ggttgaaggaagtttgggt

SEQ ID NO: 2509 - RNA, 19 nt, synthetic construct
  source 1..19: mol_type = other RNA
acccaaacttccttcaacc

SEQ ID NO: 2510 - RNA, 19 nt, synthetic construct
  source 1..19: mol_type = other RNA
gttgaaggaagtttgggtt

SEQ ID NO: 2511 - RNA, 19 nt, synthetic construct
  source 1..19: mol_type = other RNA
aacccaaacttccttcaac

SEQ ID NO: 2512 - RNA, 19 nt, synthetic construct
  source 1..19: mol_type = other RNA
ttgaaggaagtttgggttg

SEQ ID NO: 2513 - RNA, 19 nt, synthetic construct
  source 1..19: mol_type = other RNA
caacccaaacttccttcaa

SEQ ID NO: 2514 - RNA, 19 nt, synthetic construct
  source 1..19: mol_type = other RNA
tgaaggaagtttgggttga

SEQ ID NO: 2515 - RNA, 19 nt, synthetic construct
  source 1..19: mol_type = other RNA
tcaacccaaacttccttca

SEQ ID NO: 2516 - RNA, 19 nt, synthetic construct
  source 1..19: mol_type = other RNA
gaaggaagtttgggttgat

SEQ ID NO: 2517 - RNA, 19 nt, synthetic construct
  source 1..19: mol_type = other RNA
atcaacccaaacttccttc

SEQ ID NO: 2518 - RNA, 19 nt, synthetic construct
  source 1..19: mol_type = other RNA
aaggaagtttgggttgatt

SEQ ID NO: 2519 - RNA, 19 nt, synthetic construct
  source 1..19: mol_type = other RNA
aatcaacccaaacttcctt

SEQ ID NO: 2520 - RNA, 19 nt, synthetic construct
  source 1..19: mol_type = other RNA
gtggtgttttgtttaatag

SEQ ID NO: 2521 - RNA, 19 nt, synthetic construct
  source 1..19: mol_type = other RNA
ctattaaacaaaacaccac

SEQ ID NO: 2522 - RNA, 19 nt, synthetic construct
  source 1..19: mol_type = other RNA
ggtgttttgtttaatagag

SEQ ID NO: 2523 - RNA, 19 nt, synthetic construct
  source 1..19: mol_type = other RNA
ctctattaaacaaaacacc

SEQ ID NO: 2524 - RNA, 19 nt, synthetic construct
  source 1..19: mol_type = other RNA
cagctggtctgacagattt

SEQ ID NO: 2525 - RNA, 19 nt, synthetic construct
  source 1..19: mol_type = other RNA
aaatctgtcagaccagctg

SEQ ID NO: 2526 - RNA, 19 nt, synthetic construct
  source 1..19: mol_type = other RNA
agctggtctgacagattta

SEQ ID NO: 2527 - RNA, 19 nt, synthetic construct
  source 1..19: mol_type = other RNA
taaatctgtcagaccagct

SEQ ID NO: 2528 - RNA, 19 nt, synthetic construct
  source 1..19: mol_type = other RNA
gctggtctgacagatttaa

SEQ ID NO: 2529 - RNA, 19 nt, synthetic construct
  source 1..19: mol_type = other RNA
ttaaatctgtcagaccagc

SEQ ID NO: 2530 - RNA, 19 nt, synthetic construct
  source 1..19: mol_type = other RNA
ctggtctgacagatttaag

SEQ ID NO: 2531 - RNA, 19 nt, synthetic construct
  source 1..19: mol_type = other RNA
cttaaatctgtcagaccag

SEQ ID NO: 2532 - RNA, 19 nt, synthetic construct
  source 1..19: mol_type = other RNA
tggtctgacagatttaaga

SEQ ID NO: 2533 - RNA, 19 nt, synthetic construct
  source 1..19: mol_type = other RNA
tcttaaatctgtcagacca

SEQ ID NO: 2534 - RNA, 19 nt, synthetic construct
  source 1..19: mol_type = other RNA
ggtctgacagatttaagaa

SEQ ID NO: 2535 - RNA, 19 nt, synthetic construct
  source 1..19: mol_type = other RNA
ttcttaaatctgtcagacc

SEQ ID NO: 2536 - RNA, 19 nt, synthetic construct
  source 1..19: mol_type = other RNA
actctcattcttaaaagac

SEQ ID NO: 2537 - RNA, 19 nt, synthetic construct
  source 1..19: mol_type = other RNA
gtcttttaagaatgagagt

SEQ ID NO: 2538 - RNA, 19 nt, synthetic construct
  source 1..19: mol_type = other RNA
ctctcattcttaaaagact

SEQ ID NO: 2539 - RNA, 19 nt, synthetic construct
  source 1..19: mol_type = other RNA
agtcttttaagaatgagag

SEQ ID NO: 2540 - RNA, 19 nt, synthetic construct
  source 1..19: mol_type = other RNA
cattcttaaaagactttgg

SEQ ID NO: 2541 - RNA, 19 nt, synthetic construct
  source 1..19: mol_type = other RNA
ccaaagtcttttaagaatg

SEQ ID NO: 2542 - RNA, 19 nt, synthetic construct
  source 1..19: mol_type = other RNA
ttcttaaaagactttggac

SEQ ID NO: 2543 - RNA, 19 nt, synthetic construct
  source 1..19: mol_type = other RNA
gtccaaagtcttttaagaa

SEQ ID NO: 2544 - RNA, 19 nt, synthetic construct
  source 1..19: mol_type = other RNA
tcttaaaagactttggact

SEQ ID NO: 2545 - RNA, 19 nt, synthetic construct
  source 1..19: mol_type = other RNA
agtccaaagtcttttaaga

SEQ ID NO: 2546 - RNA, 19 nt, synthetic construct
  source 1..19: mol_type = other RNA
cttaaaagactttggactt

SEQ ID NO: 2547 - RNA, 19 nt, synthetic construct
  source 1..19: mol_type = other RNA
aagtccaaagtcttttaag

SEQ ID NO: 2548 - RNA, 19 nt, synthetic construct
  source 1..19: mol_type = other RNA
ctttggacttaaattctag

SEQ ID NO: 2549 - RNA, 19 nt, synthetic construct
  source 1..19: mol_type = other RNA
ctagaatttaagtccaaag

SEQ ID NO: 2550 - RNA, 19 nt, synthetic construct
  source 1..19: mol_type = other RNA
tttggacttaaattctagc

SEQ ID NO: 2551 - RNA, 19 nt, synthetic construct
  source 1..19: mol_type = other RNA
gctagaatttaagtccaaa

SEQ ID NO: 2552 - RNA, 19 nt, synthetic construct
  source 1..19: mol_type = other RNA
ttggacttaaattctagca

SEQ ID NO: 2553 - RNA, 19 nt, synthetic construct
  source 1..19: mol_type = other RNA
tgctagaatttaagtccaa

SEQ ID NO: 2554 - RNA, 19 nt, synthetic construct
  source 1..19: mol_type = other RNA
ggacttaaattctagcatt

SEQ ID NO: 2555 - RNA, 19 nt, synthetic construct
  source 1..19: mol_type = other RNA
aatgctagaatttaagtcc

SEQ ID NO: 2556 - RNA, 19 nt, synthetic construct
  source 1..19: mol_type = other RNA
tagcattttagactaggac

SEQ ID NO: 2557 - RNA, 19 nt, synthetic construct
  source 1..19: mol_type = other RNA
gtcctagtctaaaatgcta

SEQ ID NO: 2558 - RNA, 19 nt, synthetic construct
  source 1..19: mol_type = other RNA
agcattttagactaggact

SEQ ID NO: 2559 - RNA, 19 nt, synthetic construct
  source 1..19: mol_type = other RNA
agtcctagtctaaaatgct

SEQ ID NO: 2560 - RNA, 19 nt, synthetic construct
  source 1..19: mol_type = other RNA
gactgttctactgtgaaga

SEQ ID NO: 2561 - RNA, 19 nt, synthetic construct
  source 1..19: mol_type = other RNA
tcttcacagtagaacagtc

SEQ ID NO: 2562 - RNA, 19 nt, synthetic construct
  source 1..19: mol_type = other RNA
aagttctgtctcctttagc

SEQ ID NO: 2563 - RNA, 19 nt, synthetic construct
  source 1..19: mol_type = other RNA
gctaaaggagacagaactt

SEQ ID NO: 2564 - RNA, 19 nt, synthetic construct
  source 1..19: mol_type = other RNA
agttctgtctcctttagcc

SEQ ID NO: 2565 - RNA, 19 nt, synthetic construct
  source 1..19: mol_type = other RNA
ggctaaaggagacagaact

SEQ ID NO: 2566 - RNA, 19 nt, synthetic construct
  source 1..19: mol_type = other RNA
gttctgtctcctttagccc

SEQ ID NO: 2567 - RNA, 19 nt, synthetic construct
  source 1..19: mol_type = other RNA
gggctaaaggagacagaac

SEQ ID NO: 2568 - RNA, 19 nt, synthetic construct
  source 1..19: mol_type = other RNA
ttctgtctcctttagcccg

SEQ ID NO: 2569 - RNA, 19 nt, synthetic construct
  source 1..19: mol_type = other RNA
cgggctaaaggagacagaa

SEQ ID NO: 2570 - RNA, 19 nt, synthetic construct
  source 1..19: mol_type = other RNA
tctgtctcctttagcccgg

SEQ ID NO: 2571 - RNA, 19 nt, synthetic construct
  source 1..19: mol_type = other RNA
ccgggctaaaggagacaga

SEQ ID NO: 2572 - RNA, 19 nt, synthetic construct
  source 1..19: mol_type = other RNA
ctgtctcctttagcccggt

SEQ ID NO: 2573 - RNA, 19 nt, synthetic construct
  source 1..19: mol_type = other RNA
accgggctaaaggagacag

SEQ ID NO: 2574 - RNA, 19 nt, synthetic construct
  source 1..19: mol_type = other RNA
tgtctcctttagcccggtt

SEQ ID NO: 2575 - RNA, 19 nt, synthetic construct
  source 1..19: mol_type = other RNA
aaccgggctaaaggagaca

SEQ ID NO: 2576 - RNA, 19 nt, synthetic construct
  source 1..19: mol_type = other RNA
gtctcctttagcccggttt

SEQ ID NO: 2577 - RNA, 19 nt, synthetic construct
  source 1..19: mol_type = other RNA
aaaccgggctaaaggagac

SEQ ID NO: 2578 - RNA, 19 nt, synthetic construct
  source 1..19: mol_type = other RNA
gcccggtttgtttctccct

SEQ ID NO: 2579 - RNA, 19 nt, synthetic construct
  source 1..19: mol_type = other RNA
agggagaaacaaaccgggc

SEQ ID NO: 2580 - RNA, 19 nt, synthetic construct
  source 1..19: mol_type = other RNA
cccggtttgtttctccctg

SEQ ID NO: 2581 - RNA, 19 nt, synthetic construct
  source 1..19: mol_type = other RNA
cagggagaaacaaaccggg

SEQ ID NO: 2582 - RNA, 19 nt, synthetic construct
  source 1..19: mol_type = other RNA
tgtttctccctgctcaggt

SEQ ID NO: 2583 - RNA, 19 nt, synthetic construct
  source 1..19: mol_type = other RNA
acctgagcagggagaaaca

SEQ ID NO: 2584 - RNA, 19 nt, synthetic construct
  source 1..19: mol_type = other RNA
tttctccctgctcaggtct

SEQ ID NO: 2585 - RNA, 19 nt, synthetic construct
  source 1..19: mol_type = other RNA
agacctgagcagggagaaa

SEQ ID NO: 2586 - RNA, 19 nt, synthetic construct
  source 1..19: mol_type = other RNA
ttctccctgctcaggtcta

SEQ ID NO: 2587 - RNA, 19 nt, synthetic construct
  source 1..19: mol_type = other RNA
tagacctgagcagggagaa

SEQ ID NO: 2588 - RNA, 19 nt, synthetic construct
  source 1..19: mol_type = other RNA
tctccctgctcaggtctag

SEQ ID NO: 2589 - RNA, 19 nt, synthetic construct
  source 1..19: mol_type = other RNA
ctagacctgagcagggaga

SEQ ID NO: 2590 - RNA, 19 nt, synthetic construct
  source 1..19: mol_type = other RNA
ctccctgctcaggtctaga

SEQ ID NO: 2591 - RNA, 19 nt, synthetic construct
  source 1..19: mol_type = other RNA
tctagacctgagcagggag

SEQ ID NO: 2592 - RNA, 19 nt, synthetic construct
  source 1..19: mol_type = other RNA
tccctgctcaggtctagaa

SEQ ID NO: 2593 - RNA, 19 nt, synthetic construct
  source 1..19: mol_type = other RNA
ttctagacctgagcaggga

SEQ ID NO: 2594 - RNA, 19 nt, synthetic construct
  source 1..19: mol_type = other RNA
ccctgctcaggtctagaat

SEQ ID NO: 2595 - RNA, 19 nt, synthetic construct
  source 1..19: mol_type = other RNA
attctagacctgagcaggg

SEQ ID NO: 2596 - RNA, 19 nt, synthetic construct
  source 1..19: mol_type = other RNA
cctgctcaggtctagaatc

SEQ ID NO: 2597 - RNA, 19 nt, synthetic construct
  source 1..19: mol_type = other RNA
gattctagacctgagcagg

SEQ ID NO: 2598 - RNA, 19 nt, synthetic construct
  source 1..19: mol_type = other RNA
ctgctcaggtctagaatcc

SEQ ID NO: 2599 - RNA, 19 nt, synthetic construct
  source 1..19: mol_type = other RNA
ggattctagacctgagcag

SEQ ID NO: 2600 - RNA, 19 nt, synthetic construct
  source 1..19: mol_type = other RNA
tgctcaggtctagaatccc

SEQ ID NO: 2601 - RNA, 19 nt, synthetic construct
  source 1..19: mol_type = other RNA
gggattctagacctgagca

SEQ ID NO: 2602 - RNA, 19 nt, synthetic construct
  source 1..19: mol_type = other RNA
caggtctagaatcccaagc

SEQ ID NO: 2603 - RNA, 19 nt, synthetic construct
  source 1..19: mol_type = other RNA
gcttgggattctagacctg

SEQ ID NO: 2604 - RNA, 19 nt, synthetic construct
  source 1..19: mol_type = other RNA
gtctagaatcccaagcagt

SEQ ID NO: 2605 - RNA, 19 nt, synthetic construct
  source 1..19: mol_type = other RNA
actgcttgggattctagac

SEQ ID NO: 2606 - RNA, 19 nt, synthetic construct
  source 1..19: mol_type = other RNA
ccaagcagtgttcttttct

SEQ ID NO: 2607 - RNA, 19 nt, synthetic construct
  source 1..19: mol_type = other RNA
agaaaagaacactgcttgg

SEQ ID NO: 2608 - RNA, 19 nt, synthetic construct
  source 1..19: mol_type = other RNA
caagcagtgttcttttctg

SEQ ID NO: 2609 - RNA, 19 nt, synthetic construct
  source 1..19: mol_type = other RNA
cagaaaagaacactgcttg

SEQ ID NO: 2610 - RNA, 19 nt, synthetic construct
  source 1..19: mol_type = other RNA
aagcagtgttcttttctgg

SEQ ID NO: 2611 - RNA, 19 nt, synthetic construct
  source 1..19: mol_type = other RNA
ccagaaaagaacactgctt

SEQ ID NO: 2612 - RNA, 19 nt, synthetic construct
  source 1..19: mol_type = other RNA
agcagtgttcttttctggt

SEQ ID NO: 2613 - RNA, 19 nt, synthetic construct
  source 1..19: mol_type = other RNA
accagaaaagaacactgct

SEQ ID NO: 2614 - RNA, 19 nt, synthetic construct
  source 1..19: mol_type = other RNA
gcagtgttcttttctggtg

SEQ ID NO: 2615 - RNA, 19 nt, synthetic construct
  source 1..19: mol_type = other RNA
caccagaaaagaacactgc

SEQ ID NO: 2616 - RNA, 19 nt, synthetic construct
  source 1..19: mol_type = other RNA
cagtgttcttttctggtga

SEQ ID NO: 2617 - RNA, 19 nt, synthetic construct
  source 1..19: mol_type = other RNA
tcaccagaaaagaacactg

SEQ ID NO: 2618 - RNA, 19 nt, synthetic construct
  source 1..19: mol_type = other RNA
cactgtgagccgcagatgt

SEQ ID NO: 2619 - RNA, 19 nt, synthetic construct
  source 1..19: mol_type = other RNA
acatctgcggctcacagtg

SEQ ID NO: 2620 - RNA, 19 nt, synthetic construct
  source 1..19: mol_type = other RNA
tgagccgcagatgtgactt

SEQ ID NO: 2621 - RNA, 19 nt, synthetic construct
  source 1..19: mol_type = other RNA
aagtcacatctgcggctca

SEQ ID NO: 2622 - RNA, 19 nt, synthetic construct
  source 1..19: mol_type = other RNA
gagccgcagatgtgacttt

SEQ ID NO: 2623 - RNA, 19 nt, synthetic construct
  source 1..19: mol_type = other RNA
aaagtcacatctgcggctc

SEQ ID NO: 2624 - RNA, 19 nt, synthetic construct
  source 1..19: mol_type = other RNA
agccgcagatgtgactttt

SEQ ID NO: 2625 - RNA, 19 nt, synthetic construct
  source 1..19: mol_type = other RNA
aaaagtcacatctgcggct

SEQ ID NO: 2626 - RNA, 19 nt, synthetic construct
  source 1..19: mol_type = other RNA
agtcatctcttcagcaatc

SEQ ID NO: 2627 - RNA, 19 nt, synthetic construct
  source 1..19: mol_type = other RNA
gattgctgaagagatgact

SEQ ID NO: 2628 - RNA, 19 nt, synthetic construct
  source 1..19: mol_type = other RNA
gtcatctcttcagcaatcc

SEQ ID NO: 2629 - RNA, 19 nt, synthetic construct
  source 1..19: mol_type = other RNA
ggattgctgaagagatgac

SEQ ID NO: 2630 - RNA, 19 nt, synthetic construct
  source 1..19: mol_type = other RNA
tcatctcttcagcaatcca

SEQ ID NO: 2631 - RNA, 19 nt, synthetic construct
  source 1..19: mol_type = other RNA
tggattgctgaagagatga

SEQ ID NO: 2632 - RNA, 19 nt, synthetic construct
  source 1..19: mol_type = other RNA
catctcttcagcaatccag

SEQ ID NO: 2633 - RNA, 19 nt, synthetic construct
  source 1..19: mol_type = other RNA
ctggattgctgaagagatg

SEQ ID NO: 2634 - RNA, 19 nt, synthetic construct
  source 1..19: mol_type = other RNA
atctcttcagcaatccaga

SEQ ID NO: 2635 - RNA, 19 nt, synthetic construct
  source 1..19: mol_type = other RNA
tctggattgctgaagagat

SEQ ID NO: 2636 - RNA, 19 nt, synthetic construct
  source 1..19: mol_type = other RNA
cttcagcaatccagaggtt

SEQ ID NO: 2637 - RNA, 19 nt, synthetic construct
  source 1..19: mol_type = other RNA
aacctctggattgctgaag

SEQ ID NO: 2638 - RNA, 19 nt, synthetic construct
  source 1..19: mol_type = other RNA
ttcagcaatccagaggttc

SEQ ID NO: 2639 - RNA, 19 nt, synthetic construct
  source 1..19: mol_type = other RNA
gaacctctggattgctgaa

SEQ ID NO: 2640 - RNA, 19 nt, synthetic construct
  source 1..19: mol_type = other RNA
tcagcaatccagaggttcc

SEQ ID NO: 2641 - RNA, 19 nt, synthetic construct
  source 1..19: mol_type = other RNA
ggaacctctggattgctga

SEQ ID NO: 2642 - RNA, 19 nt, synthetic construct
  source 1..19: mol_type = other RNA
cagcaatccagaggttcct

SEQ ID NO: 2643 - RNA, 19 nt, synthetic construct
  source 1..19: mol_type = other RNA
aggaacctctggattgctg

SEQ ID NO: 2644 - RNA, 19 nt, synthetic construct
  source 1..19: mol_type = other RNA
agcaatccagaggttcctt

SEQ ID NO: 2645 - RNA, 19 nt, synthetic construct
  source 1..19: mol_type = other RNA
aaggaacctctggattgct

SEQ ID NO: 2646 - RNA, 19 nt, synthetic construct
  source 1..19: mol_type = other RNA
gcaatccagaggttccttg

SEQ ID NO: 2647 - RNA, 19 nt, synthetic construct
  source 1..19: mol_type = other RNA
caaggaacctctggattgc

SEQ ID NO: 2648 - RNA, 19 nt, synthetic construct
  source 1..19: mol_type = other RNA
caatccagaggttccttga

SEQ ID NO: 2649 - RNA, 19 nt, synthetic construct
  source 1..19: mol_type = other RNA
tcaaggaacctctggattg

SEQ ID NO: 2650 - RNA, 19 nt, synthetic construct
  source 1..19: mol_type = other RNA
aatccagaggttccttgac

SEQ ID NO: 2651 - RNA, 19 nt, synthetic construct
  source 1..19: mol_type = other RNA
gtcaaggaacctctggatt

SEQ ID NO: 2652 - RNA, 19 nt, synthetic construct
  source 1..19: mol_type = other RNA
atccagaggttccttgacc

SEQ ID NO: 2653 - RNA, 19 nt, synthetic construct
  source 1..19: mol_type = other RNA
ggtcaaggaacctctggat

SEQ ID NO: 2654 - RNA, 19 nt, synthetic construct
  source 1..19: mol_type = other RNA
gttccttgacctcattatt

SEQ ID NO: 2655 - RNA, 19 nt, synthetic construct
  source 1..19: mol_type = other RNA
aataatgaggtcaaggaac

SEQ ID NO: 2656 - RNA, 19 nt, synthetic construct
  source 1..19: mol_type = other RNA
tccttgacctcattatttg

SEQ ID NO: 2657 - RNA, 19 nt, synthetic construct
  source 1..19: mol_type = other RNA
caaataatgaggtcaagga

SEQ ID NO: 2658 - RNA, 19 nt, synthetic construct
  source 1..19: mol_type = other RNA
ccttgacctcattatttgt

SEQ ID NO: 2659 - RNA, 19 nt, synthetic construct
  source 1..19: mol_type = other RNA
acaaataatgaggtcaagg

SEQ ID NO: 2660 - RNA, 19 nt, synthetic construct
  source 1..19: mol_type = other RNA
cttgacctcattatttgtc

SEQ ID NO: 2661 - RNA, 19 nt, synthetic construct
  source 1..19: mol_type = other RNA
gacaaataatgaggtcaag

SEQ ID NO: 2662 - RNA, 19 nt, synthetic construct
  source 1..19: mol_type = other RNA
ttgacctcattatttgtcc

SEQ ID NO: 2663 - RNA, 19 nt, synthetic construct
  source 1..19: mol_type = other RNA
ggacaaataatgaggtcaa

SEQ ID NO: 2664 - RNA, 19 nt, synthetic construct
  source 1..19: mol_type = other RNA
tgacctcattatttgtcct

SEQ ID NO: 2665 - RNA, 19 nt, synthetic construct
  source 1..19: mol_type = other RNA
aggacaaataatgaggtca

SEQ ID NO: 2666 - RNA, 19 nt, synthetic construct
  source 1..19: mol_type = other RNA
gacctcattatttgtccta

SEQ ID NO: 2667 - RNA, 19 nt, synthetic construct
  source 1..19: mol_type = other RNA
taggacaaataatgaggtc

SEQ ID NO: 2668 - RNA, 19 nt, synthetic construct
  source 1..19: mol_type = other RNA
acctcattatttgtcctat

SEQ ID NO: 2669 - RNA, 19 nt, synthetic construct
  source 1..19: mol_type = other RNA
ataggacaaataatgaggt

SEQ ID NO: 2670 - RNA, 19 nt, synthetic construct
  source 1..19: mol_type = other RNA
ctcattatttgtcctatct

SEQ ID NO: 2671 - RNA, 19 nt, synthetic construct
  source 1..19: mol_type = other RNA
agataggacaaataatgag

SEQ ID NO: 2672 - RNA, 19 nt, synthetic construct
  source 1..19: mol_type = other RNA
tttgtcctatctctccctt

SEQ ID NO: 2673 - RNA, 19 nt, synthetic construct
  source 1..19: mol_type = other RNA
aagggagagataggacaaa

SEQ ID NO: 2674 - RNA, 19 nt, synthetic construct
  source 1..19: mol_type = other RNA
ttgtcctatctctccctta

SEQ ID NO: 2675 - RNA, 19 nt, synthetic construct
  source 1..19: mol_type = other RNA
taagggagagataggacaa

SEQ ID NO: 2676 - RNA, 19 nt, synthetic construct
  source 1..19: mol_type = other RNA
tgtcctatctctcccttat

SEQ ID NO: 2677 - RNA, 19 nt, synthetic construct
  source 1..19: mol_type = other RNA
ataagggagagataggaca

SEQ ID NO: 2678 - RNA, 19 nt, synthetic construct
  source 1..19: mol_type = other RNA
gtcctatctctcccttata

SEQ ID NO: 2679 - RNA, 19 nt, synthetic construct
  source 1..19: mol_type = other RNA
tataagggagagataggac

SEQ ID NO: 2680 - RNA, 19 nt, synthetic construct
  source 1..19: mol_type = other RNA
tatctctcccttatagtcc

SEQ ID NO: 2681 - RNA, 19 nt, synthetic construct
  source 1..19: mol_type = other RNA
ggactataagggagagata

SEQ ID NO: 2682 - RNA, 19 nt, synthetic construct
  source 1..19: mol_type = other RNA
atctctcccttatagtcct

SEQ ID NO: 2683 - RNA, 19 nt, synthetic construct
  source 1..19: mol_type = other RNA
aggactataagggagagat

SEQ ID NO: 2684 - RNA, 19 nt, synthetic construct
  source 1..19: mol_type = other RNA
tctctcccttatagtccta

SEQ ID NO: 2685 - RNA, 19 nt, synthetic construct
  source 1..19: mol_type = other RNA
taggactataagggagaga

SEQ ID NO: 2686 - RNA, 19 nt, synthetic construct
  source 1..19: mol_type = other RNA
ctctcccttatagtcctaa

SEQ ID NO: 2687 - RNA, 19 nt, synthetic construct
  source 1..19: mol_type = other RNA
ttaggactataagggagag

SEQ ID NO: 2688 - RNA, 19 nt, synthetic construct
  source 1..19: mol_type = other RNA
ttatagtcctaagccaaga

SEQ ID NO: 2689 - RNA, 19 nt, synthetic construct
  source 1..19: mol_type = other RNA
tcttggcttaggactataa

SEQ ID NO: 2690 - RNA, 19 nt, synthetic construct
  source 1..19: mol_type = other RNA
tcctaagccaagacatttg

SEQ ID NO: 2691 - RNA, 19 nt, synthetic construct
  source 1..19: mol_type = other RNA
caaatgtcttggcttagga

SEQ ID NO: 2692 - RNA, 19 nt, synthetic construct
  source 1..19: mol_type = other RNA
cctaagccaagacatttga

SEQ ID NO: 2693 - RNA, 19 nt, synthetic construct
  source 1..19: mol_type = other RNA
tcaaatgtcttggcttagg

SEQ ID NO: 2694 - RNA, 19 nt, synthetic construct
  source 1..19: mol_type = other RNA
ctaagccaagacatttgac

SEQ ID NO: 2695 - RNA, 19 nt, synthetic construct
  source 1..19: mol_type = other RNA
gtcaaatgtcttggcttag

SEQ ID NO: 2696 - RNA, 19 nt, synthetic construct
  source 1..19: mol_type = other RNA
taagccaagacatttgacc

SEQ ID NO: 2697 - RNA, 19 nt, synthetic construct
  source 1..19: mol_type = other RNA
ggtcaaatgtcttggctta

SEQ ID NO: 2698 - RNA, 19 nt, synthetic construct
  source 1..19: mol_type = other RNA
ccaagacatttgacctttg

SEQ ID NO: 2699 - RNA, 19 nt, synthetic construct
  source 1..19: mol_type = other RNA
caaaggtcaaatgtcttgg

SEQ ID NO: 2700 - RNA, 19 nt, synthetic construct
  source 1..19: mol_type = other RNA
caagacatttgacctttga

SEQ ID NO: 2701 - RNA, 19 nt, synthetic construct
  source 1..19: mol_type = other RNA
tcaaaggtcaaatgtcttg

SEQ ID NO: 2702 - RNA, 19 nt, synthetic construct
  source 1..19: mol_type = other RNA
acctttgcagtgtcatgtg

SEQ ID NO: 2703 - RNA, 19 nt, synthetic construct
  source 1..19: mol_type = other RNA
cacatgacactgcaaaggt

SEQ ID NO: 2704 - RNA, 19 nt, synthetic construct
  source 1..19: mol_type = other RNA
gtgtcatgtgagggcgtca

SEQ ID NO: 2705 - RNA, 19 nt, synthetic construct
  source 1..19: mol_type = other RNA
tgacgccctcacatgacac

SEQ ID NO: 2706 - RNA, 19 nt, synthetic construct
  source 1..19: mol_type = other RNA
tgtcatgtgagggcgtcag

SEQ ID NO: 2707 - RNA, 19 nt, synthetic construct
  source 1..19: mol_type = other RNA
ctgacgccctcacatgaca

SEQ ID NO: 2708 - RNA, 19 nt, synthetic construct
  source 1..19: mol_type = other RNA
gtcatgtgagggcgtcagt

SEQ ID NO: 2709 - RNA, 19 nt, synthetic construct
  source 1..19: mol_type = other RNA
actgacgccctcacatgac

SEQ ID NO: 2710 - RNA, 19 nt, synthetic construct
  source 1..19: mol_type = other RNA
tcatgtgagggcgtcagta

SEQ ID NO: 2711 - RNA, 19 nt, synthetic construct
  source 1..19: mol_type = other RNA
tactgacgccctcacatga

SEQ ID NO: 2712 - RNA, 19 nt, synthetic construct
  source 1..19: mol_type = other RNA
catgtgagggcgtcagtat

SEQ ID NO: 2713 - RNA, 19 nt, synthetic construct
  source 1..19: mol_type = other RNA
atactgacgccctcacatg

SEQ ID NO: 2714 - RNA, 19 nt, synthetic construct
  source 1..19: mol_type = other RNA
atgtgagggcgtcagtata

SEQ ID NO: 2715 - RNA, 19 nt, synthetic construct
  source 1..19: mol_type = other RNA
tatactgacgccctcacat

SEQ ID NO: 2716 - RNA, 19 nt, synthetic construct
  source 1..19: mol_type = other RNA
tgtgagggcgtcagtatag

SEQ ID NO: 2717 - RNA, 19 nt, synthetic construct
  source 1..19: mol_type = other RNA
ctatactgacgccctcaca

SEQ ID NO: 2718 - RNA, 19 nt, synthetic construct
  source 1..19: mol_type = other RNA
gtgagggcgtcagtataga

SEQ ID NO: 2719 - RNA, 19 nt, synthetic construct
  source 1..19: mol_type = other RNA
tctatactgacgccctcac

SEQ ID NO: 2720 - RNA, 19 nt, synthetic construct
  source 1..19: mol_type = other RNA
tgagggcgtcagtatagag

SEQ ID NO: 2721 - RNA, 19 nt, synthetic construct
  source 1..19: mol_type = other RNA
ctctatactgacgccctca

SEQ ID NO: 2722 - RNA, 19 nt, synthetic construct
  source 1..19: mol_type = other RNA
gagggcgtcagtatagagg

SEQ ID NO: 2723 - RNA, 19 nt, synthetic construct
  source 1..19: mol_type = other RNA
cctctatactgacgccctc

SEQ ID NO: 2724 - RNA, 19 nt, synthetic construct
  source 1..19: mol_type = other RNA
agggcgtcagtatagaggc

SEQ ID NO: 2725 - RNA, 19 nt, synthetic construct
  source 1..19: mol_type = other RNA
gcctctatactgacgccct

SEQ ID NO: 2726 - RNA, 19 nt, synthetic construct
  source 1..19: mol_type = other RNA
gggcgtcagtatagaggcc

SEQ ID NO: 2727 - RNA, 19 nt, synthetic construct
  source 1..19: mol_type = other RNA
ggcctctatactgacgccc

SEQ ID NO: 2728 - RNA, 19 nt, synthetic construct
  source 1..19: mol_type = other RNA
ggcgtcagtatagaggcct

SEQ ID NO: 2729 - RNA, 19 nt, synthetic construct
  source 1..19: mol_type = other RNA
aggcctctatactgacgcc

SEQ ID NO: 2730 - RNA, 19 nt, synthetic construct
  source 1..19: mol_type = other RNA
gcgtcagtatagaggcctt

SEQ ID NO: 2731 - RNA, 19 nt, synthetic construct
  source 1..19: mol_type = other RNA
aaggcctctatactgacgc

SEQ ID NO: 2732 - RNA, 19 nt, synthetic construct
  source 1..19: mol_type = other RNA
cgtcagtatagaggccttt

SEQ ID NO: 2733 - RNA, 19 nt, synthetic construct
  source 1..19: mol_type = other RNA
aaaggcctctatactgacg

SEQ ID NO: 2734 - RNA, 19 nt, synthetic construct
  source 1..19: mol_type = other RNA
gtcagtatagaggcctttg

SEQ ID NO: 2735 - RNA, 19 nt, synthetic construct
  source 1..19: mol_type = other RNA
caaaggcctctatactgac

SEQ ID NO: 2736 - RNA, 19 nt, synthetic construct
  source 1..19: mol_type = other RNA
tcagtatagaggcctttgc

SEQ ID NO: 2737 - RNA, 19 nt, synthetic construct
  source 1..19: mol_type = other RNA
gcaaaggcctctatactga

SEQ ID NO: 2738 - RNA, 19 nt, synthetic construct
  source 1..19: mol_type = other RNA
agtatagaggcctttgcat

SEQ ID NO: 2739 - RNA, 19 nt, synthetic construct
  source 1..19: mol_type = other RNA
atgcaaaggcctctatact

SEQ ID NO: 2740 - RNA, 19 nt, synthetic construct
  source 1..19: mol_type = other RNA
gtatagaggcctttgcatc

SEQ ID NO: 2741 - RNA, 19 nt, synthetic construct
  source 1..19: mol_type = other RNA
gatgcaaaggcctctatac

SEQ ID NO: 2742 - RNA, 19 nt, synthetic construct
  source 1..19: mol_type = other RNA
tatagaggcctttgcatct

SEQ ID NO: 2743 - RNA, 19 nt, synthetic construct
  source 1..19: mol_type = other RNA
agatgcaaaggcctctata

SEQ ID NO: 2744 - RNA, 19 nt, synthetic construct
  source 1..19: mol_type = other RNA
atagaggcctttgcatctg

SEQ ID NO: 2745 - RNA, 19 nt, synthetic construct
  source 1..19: mol_type = other RNA
cagatgcaaaggcctctat

SEQ ID NO: 2746 - RNA, 19 nt, synthetic construct
  source 1..19: mol_type = other RNA
gcctttgcatctgggcctg

SEQ ID NO: 2747 - RNA, 19 nt, synthetic construct
  source 1..19: mol_type = other RNA
caggcccagatgcaaaggc

SEQ ID NO: 2748 - RNA, 19 nt, synthetic construct
  source 1..19: mol_type = other RNA
cctttgcatctgggcctgg

SEQ ID NO: 2749 - RNA, 19 nt, synthetic construct
  source 1..19: mol_type = other RNA
ccaggcccagatgcaaagg

SEQ ID NO: 2750 - RNA, 19 nt, synthetic construct
  source 1..19: mol_type = other RNA
ctttgcatctgggcctggc

SEQ ID NO: 2751 - RNA, 19 nt, synthetic construct
  source 1..19: mol_type = other RNA
gccaggcccagatgcaaag

SEQ ID NO: 2752 - RNA, 19 nt, synthetic construct
  source 1..19: mol_type = other RNA
tttgcatctgggcctggca

SEQ ID NO: 2753 - RNA, 19 nt, synthetic construct
  source 1..19: mol_type = other RNA
tgccaggcccagatgcaaa

SEQ ID NO: 2754 - RNA, 19 nt, synthetic construct
  source 1..19: mol_type = other RNA
ttgcatctgggcctggcac

SEQ ID NO: 2755 - RNA, 19 nt, synthetic construct
  source 1..19: mol_type = other RNA
gtgccaggcccagatgcaa

SEQ ID NO: 2756 - RNA, 19 nt, synthetic construct
  source 1..19: mol_type = other RNA
gtctggatttctcttggga

SEQ ID NO: 2757 - RNA, 19 nt, synthetic construct
  source 1..19: mol_type = other RNA
tcccaagagaaatccagac

SEQ ID NO: 2758 - RNA, 19 nt, synthetic construct
  source 1..19: mol_type = other RNA
tggatttctcttgggatct

SEQ ID NO: 2759 - RNA, 19 nt, synthetic construct
  source 1..19: mol_type = other RNA
agatcccaagagaaatcca

SEQ ID NO: 2760 - RNA, 19 nt, synthetic construct
  source 1..19: mol_type = other RNA
ggatttctcttgggatcta

SEQ ID NO: 2761 - RNA, 19 nt, synthetic construct
  source 1..19: mol_type = other RNA
tagatcccaagagaaatcc

SEQ ID NO: 2762 - RNA, 19 nt, synthetic construct
  source 1..19: mol_type = other RNA
gatttctcttgggatctaa

SEQ ID NO: 2763 - RNA, 19 nt, synthetic construct
  source 1..19: mol_type = other RNA
ttagatcccaagagaaatc

SEQ ID NO: 2764 - RNA, 19 nt, synthetic construct
  source 1..19: mol_type = other RNA
gtgggatcttctggacaga

SEQ ID NO: 2765 - RNA, 19 nt, synthetic construct
  source 1..19: mol_type = other RNA
tctgtccagaagatcccac

SEQ ID NO: 2766 - RNA, 19 nt, synthetic construct
  source 1..19: mol_type = other RNA
tgggatcttctggacagac

SEQ ID NO: 2767 - RNA, 19 nt, synthetic construct
  source 1..19: mol_type = other RNA
gtctgtccagaagatccca

SEQ ID NO: 2768 - RNA, 19 nt, synthetic construct
  source 1..19: mol_type = other RNA
gggatcttctggacagaca

SEQ ID NO: 2769 - RNA, 19 nt, synthetic construct
  source 1..19: mol_type = other RNA
tgtctgtccagaagatccc

SEQ ID NO: 2770 - RNA, 19 nt, synthetic construct
  source 1..19: mol_type = other RNA
ctttgcagaggacacgctg

SEQ ID NO: 2771 - RNA, 19 nt, synthetic construct
  source 1..19: mol_type = other RNA
cagcgtgtcctctgcaaag

SEQ ID NO: 2772 - RNA, 19 nt, synthetic construct
  source 1..19: mol_type = other RNA
ccctgcatcatctgtcttg

SEQ ID NO: 2773 - RNA, 19 nt, synthetic construct
  source 1..19: mol_type = other RNA
caagacagatgatgcaggg

SEQ ID NO: 2774 - RNA, 19 nt, synthetic construct
  source 1..19: mol_type = other RNA
tgcatcatctgtcttgcgt

SEQ ID NO: 2775 - RNA, 19 nt, synthetic construct
  source 1..19: mol_type = other RNA
acgcaagacagatgatgca

SEQ ID NO: 2776 - RNA, 19 nt, synthetic construct
  source 1..19: mol_type = other RNA
gcatcatctgtcttgcgtg

SEQ ID NO: 2777 - RNA, 19 nt, synthetic construct
  source 1..19: mol_type = other RNA
cacgcaagacagatgatgc

SEQ ID NO: 2778 - RNA, 19 nt, synthetic construct
  source 1..19: mol_type = other RNA
catcatctgtcttgcgtgc

SEQ ID NO: 2779 - RNA, 19 nt, synthetic construct
  source 1..19: mol_type = other RNA
gcacgcaagacagatgatg

SEQ ID NO: 2780 - RNA, 19 nt, synthetic construct
  source 1..19: mol_type = other RNA
atcatctgtcttgcgtgct

SEQ ID NO: 2781 - RNA, 19 nt, synthetic construct
  source 1..19: mol_type = other RNA
agcacgcaagacagatgat

SEQ ID NO: 2782 - RNA, 19 nt, synthetic construct
  source 1..19: mol_type = other RNA
tcatctgtcttgcgtgcta

SEQ ID NO: 2783 - RNA, 19 nt, synthetic construct
  source 1..19: mol_type = other RNA
tagcacgcaagacagatga

SEQ ID NO: 2784 - RNA, 19 nt, synthetic construct
  source 1..19: mol_type = other RNA
catctgtcttgcgtgctat

SEQ ID NO: 2785 - RNA, 19 nt, synthetic construct
  source 1..19: mol_type = other RNA
atagcacgcaagacagatg

SEQ ID NO: 2786 - RNA, 19 nt, synthetic construct
  source 1..19: mol_type = other RNA
atctgtcttgcgtgctatt

SEQ ID NO: 2787 - RNA, 19 nt, synthetic construct
  source 1..19: mol_type = other RNA
aatagcacgcaagacagat

SEQ ID NO: 2788 - RNA, 19 nt, synthetic construct
  source 1..19: mol_type = other RNA
tctgtcttgcgtgctattt

SEQ ID NO: 2789 - RNA, 19 nt, synthetic construct
  source 1..19: mol_type = other RNA
aaatagcacgcaagacaga

SEQ ID NO: 2790 - RNA, 19 nt, synthetic construct
  source 1..19: mol_type = other RNA
ctgtcttgcgtgctatttc

SEQ ID NO: 2791 - RNA, 19 nt, synthetic construct
  source 1..19: mol_type = other RNA
gaaatagcacgcaagacag

SEQ ID NO: 2792 - RNA, 19 nt, synthetic construct
  source 1..19: mol_type = other RNA
gcgtgctatttcagagtgg

SEQ ID NO: 2793 - RNA, 19 nt, synthetic construct
  source 1..19: mol_type = other RNA
ccactctgaaatagcacgc

SEQ ID NO: 2794 - RNA, 19 nt, synthetic construct
  source 1..19: mol_type = other RNA
cgtgctatttcagagtggg

SEQ ID NO: 2795 - RNA, 19 nt, synthetic construct
  source 1..19: mol_type = other RNA
cccactctgaaatagcacg

SEQ ID NO: 2796 - RNA, 19 nt, synthetic construct
  source 1..19: mol_type = other RNA
aactatttgccttctggag

SEQ ID NO: 2797 - RNA, 19 nt, synthetic construct
  source 1..19: mol_type = other RNA
ctccagaaggcaaatagtt

SEQ ID NO: 2798 - RNA, 19 nt, synthetic construct
  source 1..19: mol_type = other RNA
actatttgccttctggagc

SEQ ID NO: 2799 - RNA, 19 nt, synthetic construct
  source 1..19: mol_type = other RNA
gctccagaaggcaaatagt

SEQ ID NO: 2800 - RNA, 19 nt, synthetic construct
  source 1..19: mol_type = other RNA
ctatttgccttctggagct

SEQ ID NO: 2801 - RNA, 19 nt, synthetic construct
  source 1..19: mol_type = other RNA
agctccagaaggcaaatag

SEQ ID NO: 2802 - RNA, 19 nt, synthetic construct
  source 1..19: mol_type = other RNA
tatttgccttctggagctc

SEQ ID NO: 2803 - RNA, 19 nt, synthetic construct
  source 1..19: mol_type = other RNA
gagctccagaaggcaaata

SEQ ID NO: 2804 - RNA, 19 nt, synthetic construct
  source 1..19: mol_type = other RNA
tttgccttctggagctctt

SEQ ID NO: 2805 - RNA, 19 nt, synthetic construct
  source 1..19: mol_type = other RNA
aagagctccagaaggcaaa

SEQ ID NO: 2806 - RNA, 19 nt, synthetic construct
  source 1..19: mol_type = other RNA
ttgccttctggagctcttt

SEQ ID NO: 2807 - RNA, 19 nt, synthetic construct
  source 1..19: mol_type = other RNA
aaagagctccagaaggcaa

SEQ ID NO: 2808 - RNA, 19 nt, synthetic construct
  source 1..19: mol_type = other RNA
tgccttctggagctctttg

SEQ ID NO: 2809 - RNA, 19 nt, synthetic construct
  source 1..19: mol_type = other RNA
caaagagctccagaaggca

SEQ ID NO: 2810 - RNA, 19 nt, synthetic construct
  source 1..19: mol_type = other RNA
gccttctggagctctttgt

SEQ ID NO: 2811 - RNA, 19 nt, synthetic construct
  source 1..19: mol_type = other RNA
acaaagagctccagaaggc

SEQ ID NO: 2812 - RNA, 19 nt, synthetic construct
  source 1..19: mol_type = other RNA
ccttctggagctctttgtg

SEQ ID NO: 2813 - RNA, 19 nt, synthetic construct
  source 1..19: mol_type = other RNA
cacaaagagctccagaagg

1. A method of treating a subject having osteoarthritis or at risk of developing osteoarthritis, the method comprising administering a Procollagen Galactosyl Transferase 2 (COLGALT2) inhibitor to the subject.

2. The method of claim 1, wherein the COLGALT2 inhibitor comprises an inhibitory nucleic acid molecule that hybridizes to a COLGALT2 nucleic acid molecule.

3. The method of claim 2, wherein the inhibitory nucleic acid molecule comprises an antisense nucleic acid molecule, a small interfering RNA (siRNA), and/or a short hairpin RNA (shRNA).

4. The method of claim 3, wherein the inhibitory nucleic acid molecule comprises an siRNA.

5. The method of claim 3, wherein the inhibitory nucleic acid molecule comprises an antisense nucleic acid molecule.

6. The method of claim 1, wherein the subject is also administered an osteoarthritis therapeutic agent or osteoarthritis therapy.

7. The method of claim 1, further comprising detecting the presence or absence of a COLGALT2 variant nucleic acid molecule in a biological sample from the subject.

8. The method of claim 7, further comprising administering an osteoarthritis therapeutic agent in an amount that is the same as or less than a standard dosage amount or osteoarthritis therapy to the subject when the COLGALT2 variant nucleic acid molecule is absent from the biological sample.

9. The method of claim 7, further comprising administering an osteoarthritis therapeutic agent in an amount that is the same as or less than a standard dosage amount or osteoarthritis therapy to the subject when the subject is heterozygous for the COLGALT2 variant nucleic acid molecule.

10. The method of claim 7, wherein the COLGALT2 variant nucleic acid molecule comprises a splice-site variant, a stop-gain variant, a start-loss variant, a stop-loss variant, a frameshift variant, a missense variant, an in-frame indel variant, and/or a variant that encodes a truncated COLGALT2 variant polypeptide.

11. The method of claim 7, wherein the COLGALT2 variant nucleic acid molecule comprises any one or more of the genetic variations in the genomic nucleic acid molecule set forth in Table 4, or an mRNA molecule produced therefrom, or a cDNA molecule produced from the mRNA molecule.

12. A method of treating a subject having osteoarthritis or at risk of developing osteoarthritis by administering an osteoarthritis therapeutic agent or osteoarthritis therapy, the method comprising:
determining or having determined whether the subject has a Procollagen Galactosyl Transferase 2 (COLGALT2) variant nucleic acid molecule, by:
obtaining or having obtained a biological sample from the subject; and
performing or having performed a sequence analysis on the biological sample to determine if the subject has a genotype comprising a COLGALT2 variant nucleic acid molecule; and
administering or continuing to administer the osteoarthritis therapeutic agent in an amount that is the same as or less than a standard dosage amount or osteoarthritis therapy, and/or a COLGALT2 inhibitor to a subject that is COLGALT2 reference;
administering or continuing to administer the osteoarthritis therapeutic agent in an amount that is the same as or less than a standard dosage amount or osteoarthritis therapy, and/or a COLGALT2 inhibitor to a subject that is heterozygous for the COLGALT2 variant nucleic acid molecule; or
administering or continuing to administer the osteoarthritis therapeutic agent in a standard dosage amount or osteoarthritis therapy to a subject that is homozygous for the COLGALT2 variant nucleic acid molecule;
wherein the presence of the COLGALT2 variant nucleic acid molecule indicates the subject has a decreased risk of developing osteoarthritis.

13. The method of claim 12, wherein the COLGALT2 inhibitor comprises an inhibitory nucleic acid molecule that hybridizes to a COLGALT2 nucleic acid molecule.

14. The method of claim 13, wherein the inhibitory nucleic acid molecule comprises an antisense nucleic acid molecule, a small interfering RNA (siRNA), and/or a short hairpin RNA (shRNA).

15. The method of claim 14, wherein the inhibitory nucleic acid molecule comprises an siRNA.

16. The method of claim 14, wherein the inhibitory nucleic acid molecule comprises an antisense nucleic acid molecule.

17. The method of claim 12, wherein the method comprises administering or continuing to administer the osteoarthritis therapeutic agent in an amount that is the same as or less than a standard dosage amount or osteoarthritis therapy and the COLGALT2 inhibitor to a subject that is heterozygous for the COLGALT2 variant nucleic acid molecule.

18. The method of claim 12, wherein the method comprises administering or continuing to administer the osteoarthritis therapeutic agent in an amount that is the same as or less than a standard dosage amount or osteoarthritis therapy and the COLGALT2 inhibitor to a subject that is COLGALT2 reference.

19. The method of claim 12, wherein the COLGALT2 variant nucleic acid molecule comprises a splice-site variant, a stop-gain variant, a start-loss variant, a stop-loss variant, a frameshift variant, a missense variant, an in-frame indel variant, and/or a variant that encodes a truncated COLGALT2 variant polypeptide.

20. The method of claim 12, wherein the COLGALT2 variant nucleic acid molecule comprises any one or more of the genetic variations in the genomic nucleic acid molecule set forth in Table 4, or an mRNA molecule produced therefrom, or a cDNA molecule produced from the mRNA molecule.

21. A method of identifying a subject having an increased risk of developing osteoarthritis, the method comprising:
determining or having determined the presence or absence of a Procollagen Galactosyl Transferase 2 (COLGALT2) variant nucleic acid molecule in a biological sample obtained from the subject;
wherein:
when the subject is COLGALT2 reference, then the subject has an increased risk of developing osteoarthritis; and
when the subject is heterozygous or homozygous for the COLGALT2 variant nucleic acid molecule, then the subject has a decreased risk of developing osteoarthritis.

22-41. (canceled)
